United States Patent Application Publication US 2025/0320452 A1 - sequence listing, part 4

SEQ ID NO: 4 - DNA, 3979097 bp, synthetic construct (residues 1,989,550-3,979,097 of 3,979,097)
  source 1..3979097: mol_type = other DNA; note = Synthetic E.coli genome
cgccatacccgcgggaatgaaattctctttattcctgcgctgtttattctgtttagtcttggcggcgcggtatttggtatgggagaagaggccgtcgcctttgccattatcatcgcaccgctaatggtccggctgggctatgacagtattaccaccgtcctggtgacctatattgccacgcaaatcggttttgccagtagctggatgaacccgttttgtgtggtcgttgctcaggggattgccggcgttccggtgctttctggctccgggttgcgtatcgtggtgtgggttatcgccactctgattggcctgatctttaccatggtgtacgccagtcgagtgaaaaagaatcctcttctgagtcgcgtgcatgagtccgaccgcttctttcgtgaaaagcaggctgatgttgaacaacgtccgtttacctttggtgactggctggtattgattgtcctgaccgccgtaatggtctgggtgatttggggcgtgatcgttaatgcctggtttattccagaaattgccagccagttcttcaccatgggtctggtgattggcatcatcggcgttgttttccgccttaacggcatgacggttaataccatggctagttcctttaccgaaggggcgcgaatgatgatcgcccctgccctgctggtgggtttcgccaaagggattttgctgctggtcggtaatggtgaagcgggtgatgccagcgtgttaaataccatcctcaacagcattgccaatgccattagcggtctggacaacgcggtcgcggcctggtttatgttgctcttccaggcggtatttaatttcttcgtgacgtccggttctggtcaggcggcgttaaccatgccgttactggcaccgcttggcgatctggtcggtgttaaccgtcaggttaccgtgctggcgttccagtttggtgatggcttcagtcacatcatttacccaaccagtgcgagcttaatggcaacgctcggtgtgtgcagggtggacttccgtaactggctgaaggtgggcgcgaccctacttggactgctgtttattatgtccagcgtcgtagtgatcggcgctcagttgatgggctaccactaaaaatgttaagagccgcaattgcggctcttttttcattctgccgtttcagtctctacggcttcatttttggcattgcgcttcatccacaacgctagcgctttcaggctgtctggagtgaactcatcgcagcgtgcggtgatttcttccggcgtcagccagcaaacttcactgacttcatcttcctgtagtgcgaagggaccgtgagagacgcagctgaacaatgcgccccagacacggcaatttttatcttcgaaatagaactgcccgtgctcggcaaaggggacaccggcaatgcccaactcttcttccgcttcgcgacgcgcggattccagcagttgctcatcggcctggactacaccgcctgcggtcgcatctaacatgccgggtaaaaagtcttttgtctcggtacgacgctggaccagaattttgcccatgccatcatgcacgacgatgtaagttgcacgatgacgcagacactgtgcccgcatttgttcccggctggcttgtgcaatgacttcgttctcttcattgacaatatccacccattcagtacttgccaaacgacgctgttccattatcaggaaaccttctttttctggcgctcttacggcgcattttgagttgtgggtaaattacggattaatcgcgacctgcgcaatgatactttgatcattgagtgcgattacactaagtacgtcattatccagcatgccataactcgccggattaccgcctttcggaatactcacgctgccggggttgaagtggaaaatctccccccgctgttctgccactggcagatgggtatgaccgtacaccagcacatcgttctggtttaaagcaggcagattttccgggccaaaaagatgaccatgcgtcaaaaacagacgttgtttttccagtaatacctgttgccacggcgcggttatcgggaaatgcagcagcatttgatccacttcgctgtcgcagttgccgcgcacagcgataaccttatgtgccacttcattaagccgttcagcgactttggctggcgcgtaaccctccggtaaagcattacgcgggccgtgattcaacacgtcgccaaggatcaccagccactgggcaccgctttgggcaaacaactccagaacacgttccgtcgccggtaagctcccatgaatgtcgcttgcaaacatcagtttcatcactcactcctcgtcgaaaaaacgtaagctatgatactggattctgtcgttgctatcagccagattgcttcgcgctaagtgcaataaaacgctggacagacgctcgctgccactggaatgttgcataatccaccaggcgttctggcacctcatcgccatgtagtaccaggcggttaatcattagcgccagatcagtatcagcaatgcaccattcaccaaataaattcggctgacccagtactaacaaatgttctgccatcgcgaacagtttctctgcactggcttttccctcggccgttagtggcgcttttttcgcccccgcaaagacaacatccgtcggacgctcttcgcggatgggcatcagatcgctgcgcagccaggcctgaatctgtcgtgcacgcgcacgattttctaaatcaagcggataaatacgttcccaggtcggtggcgcaaatcgatcttccagatactccgcaatggcagaagattcactcaactcaaaatcatcgatttgtaataacggcacacggcgtgtctgaccgtaaccttgccacgtcggctgcaaatgttcaccgctgtcgaggtcgatggtcttgatatgaaagctcaggcctttttcctgcaacgccacccaggcggataacacataaggggagaaaaagtgggcatcactccaaagcgtgatagcgggtttactcattatgtcctcggcaataaagggggctggctatcaaactatagagcctttttgtcactgtcacgtgacgaatactcacgtaagtcgccgcgctttctatacttgtggtgttcagatgattaaacaaccggagctgcaatgatcgatctctatttcgccccgacacccaatggtcacaaaattacgctgtttctcgaagaagcagagctggattatcgcttgattaaggtagacctggggaaaggcggtcagtttcgtccggaatttttgcgcattagccccaacaacaaaattccggcaattgttgatcattctcctgccgatggcggcgaaccgctaagcctctttgagtctggtgccattttgttgtatctggctgagaaaacaggactctttttgagtcatgaaacgcgtgagcgcgccgccacattacagtggttattctggcaggtaggcggactggggccgatgcttgggcaaaatcatcattttaatcacgcagccccccaaaccattccttacgctattgaacgttatcaggttgaaactcagcgtctttaccatgtactgaacaagcggctggaaaacagcccctggctgggaggcgagaactacagcattgcggatattgcctgctggccgtgggttaatgcctggactcgccagcgaattgacctagcaatgtatccggcagtcaagaactggcatgagcggatccgtagccgccctgccaccgggcaggcactgctaaaagcacaactcggtgatgagcgtagcgatagttaacagaaacaggttctcgtgtattatttcatcctaagtaaaacaacggagaacctgcaatggcacaacctgccgctattattcgtataaagaaccttcgtttgcgtacgtttatcggaattaaggaagaagaaattaacaaccgtcaggatattgttatcaatgtgacgatccactaccccgccgataaagcgcgcactagcgaagatatcaacgatgcgctgaattatcgcaccgtaacgaaaaacattattcagcatgtagagaataaccgtttctctttgctggaaaaattaactcaggatgtgctcgatatcgcacgtgaacatcactgggtgacgtatgctgaagtggagatcgataaactgcacgcgctgcgctacgccgatagcgtatccatgaccttaagctggcagcgttaatcgccatatcgggaggctgcatgaacatagtgatcaccggagggacaggattaattggtcgccatttgattccgcgtttgctggagctgggccatcaaattacggtagtgacgcgtaacccgcagaaagccagttccgttctcggccctcgggtgacactatggcaagggcttgccgatcaaagcaacctcaacggcgttgatgcggtaatcaacctggccggagaaccgattgctgataaacgctggactcacgagcaaaaagagcgtctctgccaaagccgctggaatatcacgcaaaaactggtcgatttgattaatgccagcgacacgccaccgagcgtactcatttccggcagcgcaacgggctattatggtgacttaggtgaagtggtggttaccgaagaggaaccgccgcataacgaatttacccataaactctgcgctcgctgggaagaaattgcctgccgggcgcaaagtgacaaaacgcgagtgtgcctgctgcgtaccggtgtagtgctggcaccggatggcggtattctcggtaaaatgctgccgccgtttcgtcttggcctgggcgggccgattggctctggtcggcagtatctggcctggattcatattgatgatatggtcaacggtattctctggctgctggataacgagctgcgcgggccatttaatatggttagcccctacccggtacgcaatgaacaatttgcccatgcgctcggtcatgcgctgcatcgcccggccattttgcgcgtccccgcgaccgccattcgactgttaatgggcgaatctagtgtactggtattaggtggacaacgcgcgctgcctaaacggctggaagaagcgggttttgcgtttcgctggtacgatttagaagaggcgctggcggatgtcgttcgctgatgtggtttacagcaaacatccgccagttaactcccggtgttacaggattagtggctttgcgcgataagatcgtctggactaagtcgggtcaccatcataactaactctctgtctaaacctctatccagcatctcctgagcaatacgcagggcttcttcgtgtttgccctgcattgcgccttcttcacgtaatctgtcagcaatggtcatcagtttctccttttcttgtggtgcgcgttccgctatctcaccaataaatgcacgaaaacgctgggcatcccctgtttgtaatacgtaattaaacagggcttttagctgtctgtcattagtgttccctgtaactagcaggctaacaatttggtcgactaatcccaacagatcgcgctgacgaatatgtttctgaattaactccaacagcgccattttgcggtgttgcataatctcgtcatccggcaccacggtaatatccaccaacggaaaagcgctactatatattttgcgggctatagcaggctcggcaaattcatcaagccagcagagactataaggataaggacttctgcaaccatgataaaacagcatcgggagcaccaatggaagctctttatagcccgcatcaagatggttttgcattgccgcaatggaataacgcatcatgcgaaaagccattaattcttccggcttactttggtgctctatcactacataaatataacccactccctcctgcgttttcacagaccacaagaggtcggaataatattgccgcaggtcttcatcaataaaactgtttggttccagtttaagcgtcgttaaatcacacagtttgcgcagcggcgcgggaagatgaatatcaataaaatcccgcgcggtgtctggatggcgtaaaaaagatttaaataccgcatcatgcggcgtggaagttgtgcttattgtcatggcgttccgtcacccctcaaatttaagatgacgcgacaataaccacgattaacacccaatgcagcaggcagtttttatctttggacagcgaattcagaagtatttttagcggactgtaacttttacatttcagcggaagctgactcgcaaattccccatgaaaatactccggcagcgttagccaccggagaggaaattatttcaggcttcccttaaggaaccgttgcagacgagggctttgcgggttgccaaataactgctccggcgcgccctcttcttctattttcccctgatggaggaaaatgacatgagtagaaacatggcgagcaaagcccatttcgtgagtcactaccaccatggttttcccctcttctgccagttgctgcataatacgcaacacttcgcctaccagttcaggatcgagcgcgctggtaggttcatcaaacagtaaaacttccggttccatcgccagcgcccgcgcgatagaaacacgctgttgctgaccgccggaaagatgcaccggatatttcccctgcgcacgttcgtctatcccgacttttgccagatacttcaccgcccgctcgcgcgcttcctgcttgctcaggcccaacacctgaatcggcgcttccatgacgttttccagcaccgtcatatggctccagagattgaagtgctggaataccatcgtcaggcgtgtgcgcagtaagcgcagttgatttttatcggcgactttgagttgaccgtctttgtcgcgcaccagattgatcgtctggccattgaccacgatgctcccttcactcggtttttcgaggaagttaatgcagcgcagaaaggtacttttcccgcttccgctgcttccgatgatgcttattacatctccggcattcgcttgcagacttacccctttcagcacttcatgttcgccgtagcgtttgtgcaaatcgataacgtttaatttattctcggacatcgtattctcagtgcgtactagaaggtttcacatgctgcaaccagcgtttttccgctctgcgaaagaggctgatcaggacataagagatgattaaatagagcaccgcggcaatgccgaaggcggtaaaaggttgatacgtggcggcgttaatatcgcgggctattttcagcagatccggcaccgtggcagtaaatgccaacgcagtagagtgcagcatcaggatcacttcgttgctgtatgccggtaacgcaatacgcagcgcagaaggcaaaataatgcagcgatacattttaaaagtgctgaagccataggctctggcggcttcaatttccccatgcggaacgctacggattgccccagcaaaaatctcggtagtgtaagcgcaggtgttaagcgtcagcgccagcacggtacagttcaggccactgcggaagaaagcgttaaggaattcggttcccttaacaatctcaagcgtgtacatgccggaatagaacaccagcaactgaacatacagcggcgtaccgcgaaaaatataggtaaataaccagattggaaactggatgtatttattactggagacacgaccaatcgccagaaacagcgccaggactccgcctatcactacgctcaaaataagcagccacagagtgatcgccacaccagtaaagcgataaccgtcggtccacagcagcggtttccagtattcatgtaagatttcgatcacaggtcagccctcttcacacccacggagtagcggcgctcaaggaacagcagcacaccattggaaacagtggtgaaaaccaggtaaatcacgccacagacgatggcgaaatagaacggttcccaggtacttttgcctgccagttgggtggctttgaccacatcttccaggccgagtaagctaaccagtgcggtagatttgaggatcacctgccagttgttgccaatgcctggcagggcgtaacgcatcatgctcggaaacatgatccgccgaaacacttgcccacgagtaaaaccgaacgccgtcgccgcctctatatgtcctttcggcactgccataaaagcaccacggaacgtttcggtaaaataagcaccgtagataaaaccgagagtgataataccagcgaccatcggatcgatatcaatctgcccgacgcccatcgcctccgtcaccgtgtttagcgcaatctgcaaaccgtagaaaatcagcagcatcaacactaagtccggcacgccacgaatcagcgtggtgtacccttcgaaaatcagcccgctaagccgattttggctgagcttaccgccagcgccaattaaaccgatgattacagcgagcactacagagctgatagccagctccagcgtgacgagcgcaccctgtaaaataacaccactaaacccatacaacatgctgcctgtcctgtcgtgtgtggtgaattaccgcctcttgtctccctccggttacccgaagggagcgggctttctttcaccgatggcgattagccaccataaacatcaaaatcgaagtactttttcgctaatttctcgtaagtaccgtcagcgcgcatttcggcaaaggctttgttcagtgcttcgcgcagttcgttatcttctttacgcaggcccatgccggtccctacgccaaacagtttttcatctttaacagacgggccaccgaatttgtaatctttaccgacaggttgtttgaggaaaccttcgctggcagcgacctcatcctggaacgcggcatcaatacgtccggcagtcaggtcagaataaatgttgtcctgcccctgatagctgacgatttcaatgccttttggtgcccaatgttcattaccgaacgtctcctgggtggtgccctgcaatacgcctacccgtttgcctttcaggctctcgactgtcggctgaatgtcagaatttttcgccaccaccaaacgagaatcggcagcgtacagtttgtcggtgaaggctatttcttgctgacgtttttccgtaatggaaaggctactcatgatggcgtcaatcttcttcgcttttaaggacgggattaacgcatccagcggattttcgacaaacgtacattgcgtattgatgcgtttgcataattcctttgccagatcgatatcgaagccaaccagttcgccttgactatttttactttcaaatggcgcataggtcgggtcggtaccgatgcggatgttttgcggaatcgcagcaaacgccgcagttgcgctggagaaggccagaaccagagagaggcttagcaccagttttttcataatgtcctcaactgacagtctttttatagggaatatttacaggtttgttacacttatcgtgccataaaattgaccatcaaggcaaaatatcccgccccgttagacgtattatttttcattaaaaatgcttaagtatgcatttcaatgcaccacgatagtgcaacaaacctggcgtgcaccatgatgatcattccatcaggtacagcttcccagcgacgtatcagtcaccgtagacattaaagtcgaaatactttttcgccatcttgtcgtaggtgccgtcctgacgcagctcgccaagcgccttattgaaggcagccgtcagttcagcatcatctttacgtagccctacaccggtgccatcaccgaagtattttttgtcttttacactactgccagcaaaggcgaaatctttaccagcaggttgcttgaggaatccttcgctggcagcaacttcatcttgtaacgcagcatccagacgtcctgcagccagatcggaatagaccaaatcctggttggcataggccaccacatccacgcctttactacgccaggtctcgttagcgtaagcttcctgggtacttccctgcagcacaccaacatgtttacctttcagactatccagcgttggctgaatcggactacctttggccgcaatcaaacgagaatctgcggcgtacagcttgtcggagaaggcaatctcctgctgacgtttatcggtaatggaaaggctgctaataatagcgtcgatttttttcgctttcagactggggatcagcgcgtcaaagtcactggcaacccaggtacatttcacctgcatccgtttgcacatctcgttaccgagatcgatatcaaagccaacaaaatcacctttagcatctttgctactgaacggtgcgtaggtggtatcggttccgatacgtaccgtctccggtagcgccgcatagctggaagccgctgtggagagaccgactaacaaagacagagcgagaatgctcttcttcatacataaccctcaagtgaaaatggcttttttatgttgtgtattgtgttgtgtgtttgcaggctctttcatgcaggtcttatgccatcttgacgacaacagtaacattcaacgttaaatatgttaataagacgttgcattattgtcctgaagttgaagatagcaggtatagcggttgaatcgcagcgtttcgattgaatggcagaaacaaaatgtcgaggatttgatcgcggttgcaaaattgccctgaaacagggcaacagcggagttatgcgccctgccagcgggcaaagagatcttcaggaagggttatcgcaaactggtcaagaacacgattaaccgtctgatttatcacatcatcaagggattgcgggcgatgataaaacgccggaacgggaggcataatcaccgcaccgatttctgccgcctgagtcattaaacgcagatggcctaagtgcaatggtgtttcacgcacgcagagcaccaacgggcgacgctctttcagcaccacatctgccgcacgggtcagtaagccatcagtatagctatggacaatgccggaaagggttttgatactacagggtaaaatcaccatccccagcgtctggaaagaaccggaagagatgctggcggcaatatcgcgcgcatcgtgcgtgacatcggctaatgcctgcacttcgcgcagagaaaaatccgtttcgagggataaggtctggcgcgctgcctggctcatcaccagatgcgtttcgatatctgtgacatcgcgcagaacctgtaataagcgcacgccataaatcgcgccgctggcaccgctgatgcctacaatgagtcgtttcataaatagttgccctgtcagacttgcaggcagactttgcaggatttcggcgggagttgcaagtcagggtgccagaccggcaccctcagcgaaggcatcatccttcgttatgcatttcgagattttccacttcgttctgacgttgcactgctttggcgtcatcattacgtaacgtatcgaggaaatcgaggtagccctgatcaacatctttggtgacgtagacgccgttgaacacgctgcattcaaactgctggatatccggattttcagcgcgaacggcgtcgatcagatcgttcagatcctggaaaatcaacccgtcagcaccgatgatctggcgaatttcatcaacttcgcgaccgtgagcgatcagttccgtggcgctcggcatatcaataccataaacgttcgggaagcgaatttccggtgccgcagaagcgaggtacactttcttcgctccggcttcgcgtgccatctcgataatctgctcagaagtggtgccacggacgatggagtcgtcgaccagcaggacgtttttatcgcggaactcggcgcggttggcattcagtttacggcgcacggacttacgacgcagctgctggcccggcatgataaaggtgcggccaacatagcggtttttaacgaagccctggcggtacggtttgcccagaatacgagcaatttccagcgcgatatcacagctggtttctgggatcgggatcaccacgtcgatatccagatcttcccattcgcgggcaattttctcgcccagtttcgtgcccatattcacacgcgcgctgtaaacggaaattttgtcgataaagctgtccgggcgggcaaagtatacatactcaaacaggcacggattgctgaccggattgtcagcacattgacgggtaaacaactgcccttcttcagtgatgtaaatcgcttcgcccggcgcgacgtcacgcaggaaatcaaagcccagcgtatcgagcgctacgctttcggaagcgaccatatattctgtacggttctcgtcaatatcacgttttcccagtaccagcggacgaatcccgtttggatcgcggaaagcaaccataccgtggccgataatcatcgccacacaggcatacgcgccgcggattaagcggtttgtggcagcaatggcagcgaaaatattgtcggcttccagcgggtagtggcggaagttgtccagctcgctggcgaagatattaagcagaatttcgctgtcggaagtggtgttgatgtggcggcgtttttcttcaaacagttttttacgcaactcgtgagcgttggtcagattgccgttgtgggcaagcgtaatgccatacggggagttaacgtaaaacggctgcgcttcagaggcgctggagctgccagccgtggggtaacgcacatgaccaatgcccatattgccctgcaaacgctgcatatggcgagcttcaaatacatcgctcaccagcccgttcgctttacgcaaacggaagcagttattggcatctatggtgatgatgccggcggcatcctgaccgcgatgctgaagcaccgttaaggcatcataaatgctctggttaaccggcataacaccggcgataccgacaataccgcacatacgtctttttcctcgttaagccacatctcagagcacttacgctctgggcaagaaactactgctgctttgcagataatcaaaaaaacatctgatgataaaactgaattgcgggatcagctgacttttgctccagtcttcgcttttgctcaccccggtaaaggagtcgagaaagaagagaatggcagcaacaatcaacacaccgcgcaacgcaccgaaacagacgcccagcacccgatcggtgccactcaaccccgttttctccaccaactggcctatcacgaagttcacgatagcaccaacgatcagggtagcgataaacagtaccgcgatggcaatcccatttcgaaccagttcgtcttcaaagcccgtaaaccagacactcaggtaagtgtagtaatgactggcaacaaagaaagcacaaccccatgtcaccaggcttaacgcttcacgaacaaagccgcggatcaggctaaccagagaggaaaaagcaatcaccgcgattatggcgtaatcaatccagaccatatgtgtcccacgattttacgccctgtcatcctgttcggggcgcattctaacagaaaaagaaaacgtttgcgtagggatttccttcccgcgcatcaataaaaatggcgctgaaaaaatattcaacgccatcgactttttatgcctttgcggcatcgggcaatgcgtgtcggatgcggcgtaaacgccttatccgacctacggttctacccctgcgtaggcctgataagacgcgccagcgtcgcatcaggcaagaccgtattaattcggcgtatagcccattaccacgccacttaagccagaaagttgcttcaactcacccaggctacctttcagcttatctttgctggcatccggcccaaccagaatacgggtaattttaccctgcactggcgtggatgggctcgtataaacccgataaccggcaccgcgcagcttaccgacaatctcattcactttatcggcatttttcagcgcacccagttgcacaacataggctttacccgtcggtgcagctttttcttccacgaccggcttcggttctggcttcggcgcaggtggtgcttcaacctttggtttaggcggctccaccggtttcggcttcggtggggcgaccggtgcaggttccggttcaaactcggtgttattggctgcaatagtggccggatcgaggctcggtgctgcggcatcacctgcccgcacctcttccgctgcgccttccggcggctgcgtcggtaacgcctgggtggcggctggcatcatatcaggctcatcacgatcgcccgctttcggcaccagcgggatagccgcgaactcatcctgataatgttttttctgcccgtccagcagccctggaagtacaatcacccccagcgccaccagcacgatcgtgcccactaaccgattctgaaacttacttgccaccgcttctcctcgcgtcaatcacttccatgacatgtgcgaccgtgtggaaagaaccacacaccagcacggtgtcttccgctttagcgtccgccattgcggcatcccatgcctgcgcaacgctatcaaaacttttgccgttacccaaatgctcaagcagttgttctgccgtggcaccgcgcggcccttccagtggcgcacaataccagtcatcaaccacgcttttcaaccaggccagagttccggcaatatctttatcatgtagcataccgataaccgccagcacgcgcccgtttttcggtagcgctttcatacgcccggtgagatattccgccgcatgtggattatgcgcgacatcaaaaataacgcgtgggctctcgctcacaatctggaaacgtcccggcaaaattgcgctggcaatcccgtcgcgaatggcattttcactgacttccagcccgctggcacgcagtgccgccagcgctgttgcggcattcggttgcgggacaagcggcaacggcagattttccagcgtgccgtgagcatcgctaaacgcccagtcatgatcggtgacggaatagttccactcaacgccccgacgttgtaacagtgcacctttttcctgcgccacatcagcaatggtagaaggcatttccggctcaccgacaattgccggtttttcgctgcggaagatgcctgctttctcgcgaccaatactttcgcgatctggacccagccagtcggtatgatccagcgcaatactggttactaccgcgacatcggcgtcgacaatattggttgcgtccagacgaccgcccagccctacttccagaatcaccacgtcaagttgtgcctgcttgaacagccacaacgcgctcagcgtaccgtactcgaaataggtcagggaaatatcaccgcgtgcgctttcaatctccgcaaaagaggcggtgtgggcgctttccggcaattcctggccctgcacacgtacgcgctcggtataacgcaccagatgagggctactgtagacgcccactttgtaccctgccgccatcagaatgctctccagcgtacggcaggtggtgcctttgccattcgtacccgcaacggtaaacacaaatggcgctggtttcaggacgccaagacgcgccgcgaccaggctcacgcgctcaaggccgagatcgatagttttactgtgcaggttttccagataagaaagccagctagccagagggctcgcggcttgaggagtgcgtttgataatcatggtatccgctgattcgttacggtgagaatagcaaaagggcagagccagtggccctgcccttatcagttatcaggcctcaggttcctgatccggtaccgggggtaccactacgccttcacgcggcgcttcaggattcggcgctggcagattcatcaacttcgccagaatgctcgccagtttcaggcgcatttccggacgacggacgatcatgtcgatcgcgcctttctcgatcaggaattcactgcgctggaatccaggcggcagtttttcgcgaacggtctgttcgataacacgcggaccggcaaagccgattaacgctttcggttcagcgatgttgagatcgcccagcatggcgaaacttgcagaaacaccgcccatcgtcgggtcggtcagcacggagatgtacggcaagccgcgctcctgcatttttgccagtgccgcagaggttttcgccatctgcatcaggctcatcagtgcttcctgcatacgtgcgccaccagaggcggagaagcagatcagcgggcagttatcttccagcgcctgctcaacggcacgcacgaaacgtgcacccacaacagaccccatactaccgcccataaaggcgaactcgaatgccgcagcgacaaccggcattccatacagagtgcctttcatcaccaccagcgcatctttttcgccggtttctttctgcgcagatgccagacggtctttatacttcttggagtcacgaaacttcagcacatctttcggctcaagctcgctacccagctccacaaggcttccttcatctaacaggctatgcaggcgattacgcgctgtcatacgcatgtgatggtcacacttcggacagacctcaagattacgttccagctcagcgcggtataaaacctgaccgcagctatcacacttagtccacaccccttcaggaatgctcgccttgcgggtgggagtaatgttgcttttaattcgttcaatccagctcattagggacctttctgtctgaacctggttcgatgccagttttatctttggggacgcataatgccatttttgcccccaacagaccatgaatgttgcacattaaaacataacagcccgaaactttggataaaaaagtggtcgaaccgcggagttactttttattttgcggcgcgtgccgcagcgcgtttgtgacggattatttcgatgacgcccggcaaaatagaaaccacaataatcccgacgatcagcagcttaaggttatcctgaaccatcgggattgtaccgaagaaatagcctgcgtaggtaaaaagcagtacccacaacagtgcgccgatcacgttataagcggcgaaatgacggtagctcatgtggcccattcccgcaacaaacggggcgaacgttctgacgatcggcacaaaacgggcgagaataatcgttttgccgccatgtttctcataaaactgatgggttttgtcgagataactgcgacggaaaattttgctattgggattactgaacaacttttcaccgaacaaccgcccgatagtgtaattgaccgcgtcacccacaatcgcggcgatcagcatcagcaccaccatcatatggacgttgagatcgttggtttccagacttgccaacgctccggcaacaaacagcaaactatcacccggtaaaaacggcgttaccaccagaccggtttcacagaacaaaattaagaacaaaatggcataaacccagacgccgtactccgcgaccagctctgccagatgcacgtcaatgtgcaggataaaatcgatgaggaaataaatcaggtccatatttgcctatgccttgtactcgtcatctttcaggctgtaactacgttggctacagcctgaaatgttccgagcattattctcgttagtccgccagaaatagcgggcccattggcggttttggaagatcataccggtcagggtaatccaccgcgaccagatacagcccttccgcttttgccgttgctgccgccagcgttctgtcctttgccgccagcaactctgctatccagctctccggctggttgtgggcaccgacttccatcaggctgccgacaatattcctgaccatatgatgtacaaaagcattcgctttaatatctaccaccacataaggaccgtgacgcgtgacattaatatgcataacgttgcgccacggggttcgggactggcactgcaccgcacggaagctggtgaaatcattctcgcccagcaagcattgcgcagcccgatgcatccgttcagcgtccagcggttcgtaaaaatgggttacccctttactcagtaccgccgggcgcagccgatgattgtagatgatgtagcgataacggcgagccgtggcgctaaatcgggcatgaaaatcatcaggtacagttttaacccaacgcacagcgatgtcaccaggtaaattcgcatttacgcccaaggtccacgccgcgtctttgcgcagcgcggttgtttcgaaatgcacaacctgcccggtaccgtgtacccctgcgtcagtacgcccggcgcagaagacggtgatgggttcgttcgccacctgggagagcgccttttccagcttctcctgcacactgcggacttcgttctgccgttgccagccgtaatacttactgccgtcgtactcaatgcccagcgcaattttataaactggcggttgttgctggtcggacattagtacagatactcctgcaccagtttctcggcgatttttactgccatcagcgcgccgccaaagcgaacgttatcggccacgctccagaactggacttgctccggcataccgtagtcattacgcacgcagccaacagaaagatgcggcgtaccgctagcatcacctacctgagttgggaattcgttctcttcagagagcacaatatcttcgccttgaacaaacgcatcacgcgcttcttctgctgccagtggacgcagagcttcaaagttgaccatctgggcatgaccgtagaataccggtgcctggacgacgctagcgctaatcatcagcccttcgtcctgcaggattttgcgtacttcgtcaacgatacgacgttcttcacgcacgctaccttcgctatccggcagtaacggcagcatgttgaacgccagctgacgcccgaagaaatcttcttcgtcaatcggaatgccgttgagcaatttcgcactctgccccgctaacgcatcgaccgcttttttgccctgggcggaggcactaatcaggctggtaacgctgatacgacttaaaccgccctgatcgattaacggtttcagtgccgccagcagctggctggtcagactgtctggtacggcgatgacattccggttccggtaatctgtcagtacaaacgggtttacttccggcaccaccagcggtacgtcgggttcgagagcaaacaatccactgctgtcgatcaccaggcaaccactgttggtcgcttcttcaacccaggcagcggtagcttctttgcctgcgacaaaaaatgccagctgcgcctgcgtccagtcgaattcagcggcatcctgcacggtgattgtcttaccaccaaagcgcagttgttcgcctgcgctttcgttacgtgccagtgcataaatttccccaaccgggaactgacgttcagccagcgtttcaagcagggcttcgcccacagcgccagttgcgcccaggacggcaatgttccagccttcagacatggtggtttactccagaaatagcaaagctccctgccaatgttacagcagagagcatgaagaagagattaacgtgccggatgatgaacggcgttaaaacccagtttacacagcaaacttgccgcactggcgtcatcacaaattacatacagagaactccattcacggcgctcaagatagtttttgcgcagtttatcgaactcacccggtatcccggcgactttacgcagcggtgcgtcatcgcggcgcacatcatacaccaaatgcaccagccttttcagcgtcggttgatcgagcgggccatgcagcgtaatgcgaccaaactctggcgcaggcagtaatgtatccagcgcaacgtgctgttcatgcccaataaacttgctataagcttcaaacacttgcgtagtaccgcgtgctttaccttccagggtatagcctgcgatatggctcgtgccgatatccacttttttcagcagctcgacgttgagttccggttcgccttcccagacatccagcactacgcttaacttctggccttcattcaggcaggtcagcaacgcagtattatcgacgactgcgccacggcaggcgttaatcagaatcgctccgggcttcaggctacggatcagtttttcatccgccagatgtagcgttttgtacggaccatctttaaagagtggcgtatggaaagtcagaatatccgcgcgctggactaactcatccaggctgcggaaatcaccctcatccccacggtcggcgcgaggcggatcgcaaagtaaggttttaatccctaacgcttccagtcgcgcctgcaatcgacgtccaacgttaccaacgcccacgatccccaccgtacggtcgtacagactaaatccatcgcgttcggcaagcatcagcagggaggagaaaacatattccaccaccgcaatcgcattacagccaggtgcagcggaaaaaccaattcccgcctgcttcaaccatgcttcatcgacatggtcggtccccgcagtggcagtgccaacaaatttaatgggttttcctgccagcaaagattcattcactttcgtgacgctacgcaccatcagcgcatccgcgtctgccagttgagcgacggggattggacgcccgggaaccgcggtcacctcacccaaacggctaaataagtcgcgggcataaggcatattttcatcaacaaggattttcacgtttgtgttacctgtatgagacgagagttaaccggacaagtgtgccataatctcgcggccaggcatacttgcgaagatttcaggtataaggatacgtaatgatacaacctatttccggccctcctcctgggcaaccaccaggtcagggagataatctgccgtctggcacgggcaatcagcctttatccagtcagcaacgtactagcctggaaagcttaatgacgaaagtgaccagtctgacgcaacagcaaagagcagaactgtgggcgggtatcaggcacgatattggtctgagcggagatagtccgctgcttagccgtcacttccctgccgctgagcataatctggcgcaacgtctgctggccgcgcaaaaaagccattctgcccgccagcttttagcgcaattaggggagtatttacgtctggggaataatcgtcaggcggtcacggattatatccgtcataactttggtcagacgccgctgaatcagctcagtccggagcaattaaaaaccattctcaccctgttgcaggaagggaagatggttattccgcaaccacagcagcgcgaggcgaccgaccgtcctttattaccggcggagcacaatgcgctaaaacagctggtgaccaaacttgcggcggcaacgggggaacccagcaaacagatctggcaaagcatgctggaactttccggggtgaaagatggcgagttaattccagcgaaactgtttaaccatctggtgacctggctacaggcgcgtcagacgctaagccagcaaaatacgccgacgctggaaagtctacagatgacgctaaaacaacctttagatgccagtgaactggcggcgttaagcgcatatatccagcaaaaatatggtctttctgcgcaaagtagcctttcttctgcccaggccgaggatattcttaatcagctttatcaacggcgggttaaagggattgatccgcgtgttatgcaaccgctgcttaatccttttccaccgatgatggacacgttgcaaaatatggcaacgcgtcccgcgctgtggatactgttagtcgcgattatcctgatgctggtctggctggttcgttaaccccgacgaaaactcagtatcgtgacaataatacccagcaccgcagagatcgccccggcaagaaatacgctagagtaaccaaacgtggtcgccagcattcccgccagcggcccggagacgccgagggcgatatcctgaaacgcggcgtaaccgcccagtgcggtgccgcgaacttgactggggacgcgtttaaccacctccacgcccagcgcaggaaagataaggctacatccggctccggttaacgccgcgcccgctaatgcgacccatgcacctggggcttgccagagcagcaacaagcccaccgtttctacaagcagagagacaatcgccactttcacgccgccaaaacggtccggcatccagccaaacatgacgcgcatcacgacaaatgcgccgccaaacgcggtaagagtaaagcccgccatcgcccatcctttgctggcaaagtagaggctaacgaaagtcccgataacagcaaaaccaacgccttgtagtgccagacctaaccctggtttccagataagcccgacaacgctccacaggcttggacgttctcccgccagggccggtactttgcgcactgtgccgttacaggcccacgccagtacgggtaataccattgtggtgatcgccagtgcggcaaaaccgtaatggctatgaatcaacaggccaagcggagcaccaacagcgagggcaccgtaaatcgccattccgttccaactcatcactttgccagagtgttttggccctacgatgcctagtccccaggtcagagcgcctgtcagtaactggctttcaccaaagccaagaatcaaacgcccgacgaccaacagagcaaatttgaacggtgcggagacaggcaaaatcgccgccagcagcaacgcgccgccagccagaccacaagctaacattccctgaagcgcgctacgttttgcaccatattgatcggccagtcgcccggcgtaaccacgcgtcagcaccgtagccagaaactgaatcccgacggcaatgccgaccatggtattgccatagcccagttcatgatgaacaaacagcgggataaccggcaacggcaaccctacggtcatgtaggtgagaaaaaccgcaaaagcgatgcggaagaggctaaaattggcagaagatcgtgtttcggtttggcttacagcagtcatgcattactccagaatgcagcgcaaggcgaggagtatccccgtctcatctctctggtttcagggttacggtgcgttggcaggatttaacgcgtacgtcttttcagaaggaaatcgacaaagcgggaagtttgcctggaactggcggcgattgtcaatgatgtgaaaaagggaaccatcaggttcccttttgcgttagtgccggaggccgcattggcgcgtaacgtcggatgcgacgctggcgcgtctactccgacctactgcgaattaatctttcagcttgcgcattaccagcgtggcgttggtgccgccgaagccgaagctgttagacataacggtggtcagttcgcgatcggtcgtttcggtcacgatgttcagacccgcagcctgctcgtccagctcttcaatgttgatgctcggggcgataaagccgtgttccagcatcagcagagagtagatagcttcctgtacgccagcagcgcccagagagtgaccggtcatggctttggttgcagaaatcgccgggctcttatcgccgaacacttcacggatagctgccagctctttcacgtcgccaaccggagtgctagtaccgtgggagttcaggtaatcgattggggtatcaacgccatgcatcgccatcttcatgcagcgtactgcgccttcgccagacggagcaaccatgtctgcaccatcagaggttgcgccgtagccaacgatttcagcatagatgtgagcaccacgcgccagcgcgtgttccagctcttcaaccactaccataccgccgccgccagcgataacgaaaccgtcacggtgagcgtcgtaagtacgggaggctttttccggggtgtcgttgtatttagtagacagcgcacccattgcgtcgaattcgcaagccatttcccagcacagctcttcgccgccgccagcaaacacgatgtcctgtttgcccagttggatctgctctactgcgttaccgatacagtgtgcggaagtcgcacacgcggagctgatggagtagttaacgccatgaattttaaacggggtggcgaggcaggcagaaacgccggatgccatcgctttggtgaccacatacgggccaaccgctttcaggccgcgcgggccgcgcattgcgtcagcgccgaacacctggaaacgcggggagccgccgccggaacctgcaatcaggccaacgcgcgggttattctggtaagcttccggagagaggcccgcatcagcgattgcctgctccatagaaaggaatgcataaatggatgcgtcgctcataaagcgcacaactttgcggtcaatgaggccagtggtatccagttttacgttgccccagacgtggctacgcatgccggaatccttcagctcctgagagaaagtgatcccactacgtccttcacgcagagatgccaggacttcctgctggttattaccgatgctggaaacaatgcccaggccagtaatcactgcacgtttcattcaatacctctgtaagtcgcacatagagtaagtttcgaatgcacaatagcgtacacttgtacgccgaacaagtccgatcagccatttaatagagaaatttgcgcagccttacacacatcgctaagatcgagccaccgcctgtaagacgagtaacttacgtgaaacactactccatacaacctgccaacctcgaatttaatgctgagggtacacctgtttcccgagattttgacgatgtctatttttccaacgataacgggctggaagagacgcgttatgtttttctgggaggcaaccaattagaggtacgctttcctgagcatccacatcctctgtttgtggtagcagagagcggcttcggcaccggattaaacttcctgacgctatggcaggcatttgatcagtttcgcgaagcgcatccgcaagcgcaattacaacgcttacatttcattagttttgagaaatttcccctcacccgtgcggatttagccttagcgcatcaacactggccggaactggctccgtgggcagaacaacttcaggcgcagtggccaatgcccttgcccggttgccatcgtttattgctcgatgaaggccgcgtgacgctggatttatggtttggcgatattaacgaactgaccagccaactggacgatagcctaaatcaaaaagtagatgcctggtttctggacggctttgcgccagcgaaaaacccggatatgtggacgcaaaatctgtttaacgccatggcaaggttggcgcgtccgggcggcacgctggcgacatttacgtctgccggttttgtccgccgcggtttgcaggacgccggattcacgatgcaaaaacgtaagggctttgggcgcaaacgggaaatgctttgcggggtgatggaacagacattaccgctcccctgctccgcgccgtggtttaaccgcacgggcagcagcaaacgggaagcggcgattatcggcggtggtattgccagcgcgttgttgagcctggcgctattacggcgcggctggcaggtaacgctttattgcgcggatgaggcccccgcactgggtgcttccggcaatcgccagggggcgctgtatccgttattaagcaaacacgatgaggcgctaaaccgctttttctctaatgcgtttacttttgctcgtcggttttacgaccaattacccgttaaatttgatcatgactggtgcggcgtcacgcagttaggctgggatgagaaaagccagcataaaatcgcacagatgttgagtatggatttacccgcagaactggctgtagccgttgaggcaaatgcggttgaacaaattacgggcgttgcgacaaattgcagcggcattacttatccgcaaggtggttggctgtgcccagcagaactgacccgtaatgtgctggaactggcgcaacagcagggtttgcagatttattatcaatatcagttacagaatttatcccgtaaggatgactgttggttgttgaattttgcaggagatcagcaagcaacacacagcgtagtggtactggcgaacgggcatcaaatcagccgattcagccaaacgagcactctcccggtgtatagcgttgccgggcaggtcagccatattccgacaacgccggaattggcagagctgaagcaggtgctgtgctatgacggttatctcacgccacaaaatccggcgaatcaacatcattgtattggtgccagttatcatcgcggcagcgaagatacggcgtacagtgaggacgatcagcagcagaatcgccagcggttgattgattgtttcccgcaggcacagtgggcaaaagaggttgatgtcagtgataaagaggcgcgctgcggtgtgcgttgtgccacccgcgatcatctgccaatggtaggcaatgttcccgattatgaggcaacactcgtggaatatgcgagcttggcggagcagaaagatgaggcggtaagcgcgccggtttttgacgatctctttatgtttgcggctttaggttctcgcggtttgtgttctgccccgctgtgtgccgagattctggcggcgcagatgagcgacgaaccgattccgatggatgccagtacgctggcggcgttaaacccgaatcggttatgggtgcggaaattgttgaagggtaaagcggttaaggcggggtaatctgctctcgcagtgtttgccggatgcggcgtgaacgccttatccgacctacgtgtgacgtgtaggcctgataagacgcgataagcgtcgcatcaggcatgctgctccagacgccgcaacttactgctgactcgcctgctgaaacaggttttcccacatatcggtcaccagcgcctggtcacgcgggctcaattcaccagcaccaatggctttttccagactctggctaacggtcgtatgcaccgcctgagcggagtggtcatcaccactttccagttctgcgatggctaatgtcaggtggccacgcaaatacccactggcaaacaactcatcatcactggcatggtcaaccataccgtcgattaatgccagaatgcgactttcaaactccgcgatcatcttctttcctcattgtaaaacgtggcgctggcttcagttgagcgcttccggccacgggaactgttccgccgtaagttccggcgtgtgataataattttgtagtgctttaatgaagcgtgccggacgttccggaatgccatttgtcagataatccatcacctgcgcatgtactcgccgttgaaacaccacacgatccggttcgaaatccccttccagattgtcgcaactgacgttaaacggatatcccgccgccacacagaacaaccagtcgagcgcctgcggcttcacttcaacatcttcaaactggctttgcgtttgggcatcgcgtccgtccgggcaataccagtagccgaaatcaaccagctcacggcgcgctttcccggcaatacaccagtggctaatctcatgaattgcgctggcataaaagccatgagcaaagacgattcggttatacggtacttccgcatcagcaggaagatagatcggttcgtcgtcgcctttaatcagacgggtattaaaatcatcggcaaagcagctattaaaaatttcaatcaactgctcgtagtggtgtgtactgttcattagttcatccccaaccagtggaggatctcctgtccgtggctgtcgtaaagtaatttggcactcatcaccgcgctgacgataacaatcatcgggcggatcagcttttgtcctttgctcaacaccagtcgactacccatgcgcgcgccgaggaactgccccaccagcatgacaaagcccgtcgcccaaatcactttgccgccgagaataaacagcagtaaaccgccgatgttactcgttgcgttgagtaatttggcgtgagccgtggctttggcgaggttaaatccgcacagcgtaacgaaggccagcgcgtaaaagctcccggcagccgggccaaagaatccatcataaaaaccgacgcagccaccggctattaacgcgaagggtaaaccgtacatccggcgctggcggtcttcttcacctagctttggcatcagcaagaaatagaggccgatacaaattaccagaatgggcaaaatctgccgtaagacatcagcctgaacgtattgcaccagcagtgcgccgctcatactgccgacaaaggtcatggcgatattgagtttctgatcgcttaaactaaccactttgcggcgaataaagtagatagtagcggaaatagagccgccgcaggcttgcagtttattggttgccagcgcattagcgggagacatccccgctgccatcaatgccggaatggtgagtaacccaccgccaccggcaatgctgtcgataaatcccgccagcatggcgacaaaaaagagaactcccagcaacagcggggaaaccataaacaggctattaaacgtttccattagatcacgtgctcatccagtagcgcctggcaggaaggcggcaacggaggcggtgtcttcttctcaggctttgttgttcccggttttggaggttcaaaccagctttgcagttctgccccgcaaccatcgccacttggcggtaaaggttgatcttcacactccagactatcggcagggcaacgtaatcgtacatgcatatgcgcgcgatgctggaaccagggtcgcactttgcgcaaccagtcgcgatcggtgcccgcatcaaggcaaagttgttgtttaatcgccggattaacaaaaatgcgcgtgacgtctttgtcctgggcggcgagtttgatcaagctgaaaatttctggcttccacagcgtggagacaacgtgtttaccgtcgcgggaaactaagtccagtgcttgcgggcgcaagagctgcgcggaggtccagcgagttttcggcagttgcagaaagatatcgacatccagtccggtctggtggctggcatgaccgccgttgaaacgcccaccagcgggcatccccatatcgccaatcagcaccgtacccatgcccagattgctcacctggctactcagacgctggataaacatcaccagatccgggtgaccgaaatagcgacgctgatcggtacgcatgacctgataatgttcggactgtatcggcagcgtgtcagcgccgacaatacagccattagaaaaactgcctatgctttgtgcgctacccggcacaggttgggttattttttgccacggcgtcgctgccaggctggcgctactggcaagcagagccagcagcgcaatcgcggttttattcattttttaccagcgtggaatatcagtcttcacatcggcattttgcgcccgttgccgtaacaggtgatccattaaaacgatcgccagcatcgcttctgcgatcggcactgcgcggatcccgacacagggatcgtgacggcctttggtgatcatctcaacttcttcgccaaagcggttaatggtacgacccggcacggtaatgctggaggtcggtttcagcgccatatgggcaatgatttgctgcccgctgctgataccgccgagaatgccgcccgcatggttgctctggaaaccgtctttggtgatttcatcgcggttctggctgccgcgcagcgccaccacgtcaaagccgtcgccaatttccacgcctttcaccgcgttgatgctcatcagcgcatgggcgatgtcagcatccaggcggtcaaagaccggctcgccaagtccggcaggaacgccactggcaacaacggtgactttagcgccgatggagtcgccctcttttttcagcgcacgcatcaactcgtctaacgcgtcgattttgtcggggtccgggcaaaaaaacggattttgctcgacctggctccagtctttgatatccagcggaatgtcgcccatctgggtcaggcagccacggatttcaataccaaatttctcggcgagatattttttggcaatagctcctgccgccacgcgcatggcggtttcgcgggcggaagaacgtccaccgccgcgataatcgcgcagaccgtatttttgttcgtaggtgtaatcggcatggcctggacggaaaacgtccttaatcgcactgtaatcctgagagcgctggtcagtgttttcgatcaacaagccaatgctggtgccggtagtaacgccttcaaaaacaccggagagaattttgacctgatccggctcgcggcgctgggtggtatagcggcttgtcccagggcgacgacggtcgaggtcatgttgcaggtccgcttccgtcagcggaatgcctggcggaacaccatcgacgatgcagccgagcgccagcccgtggctttcgccgaaggtggttacgcgaaagagttgtccaattgtgtttccagccatcacggctccgttattgttgtgtttgcgtgtttacttaatctttataaatcgcgaaatgttctcgtgcggcaataagctgctctttggtgagcataaacacaccatcgccgccgttatcaaactccagccaggtgaacggaacatccggatattgttccataagatgtaccatgctgttgccgacttcacaaatcaacacgccatcatcagcaaggtaatctgccgcgttaccgagaatgcgacgcgtcagtttcaggccgtcagtgccagatgccaggcccagttccggctcgtggcggtattcgtttggcaggtcggacatatcttccgcatcgacatacggcgggttagtgacaatcaggtcgtactgcactttcggcaagtcgcggaacagatcggaacgaatcggaatgacgttgtggatcagaccgtgttcttcgatgttctgttcagcaaccgccagcgcgtctggagagatatccaccgcgtcgacttctgcatccgggaaggcataagcacaggcaatggcgatgcagccgctaccagtacacatatctaaaatatgctgcggttgcttgctgataagtccggcaaatttattgttgatcagttcaccaatcgggctgcgcggcaccagcacgcgttcatcgacgtaaaattcatggccgcagaaccacgctttgttggtcaggtaagccaccggaatgcgttcattgacgcggcggatcacgcgttcaacaatacggtgtttttcgctggaggtcagacgcgcggtgcgcatatcttccggaatatccagcggcaggtagaggctaggcaacaccagctgtacggcttcatcccacgggttatcggtaccgtgaccgtaccagatatttgccgcgctgaagcggctcacgctccagcgcaacatgtcctgaatggtttgcagctcatttactgcttcatcaacgaaaattttatccacgtattcctccagggcatgatcgcaataatttcggcggctagtttgccatgaagatgacgataaatcagcattcacgcgcggtgagtgaggaaaaatacgtttaaaacgatcgattgcgctacgagtcgggtaaactgtaggaaaattagaaatagagacagataaatgaaaaagaaaacaacacttagcgaggaggaccaggctctgtttcgccagttgatggcggggactcgcaagattaagcaggacacgattgtccaccgaccgcagcgtaaaaaaatcagcgaagtgccggtgaaacgcttgatccaggagcaggctgatgccagccattatttctccgatgagtttcagccgttattaaataccgaaggtccggtgaaatatgttcgcccggatgtcagccattttgaggcgaagaaactgcgccgtggcgattatagcccggagttgtttttggatttacacggtctgacgcagctgcaggccaagcaggaactgggggcgttgattgccgcctgccgccgtgaacatgtgttttgcgcctgcgtgatgcatgggcacgggaagcatattttgaagcaacaaacaccgctgtggctggcacaacatccgcatgtgatggcctttcatcaggcaccaaaagagtatggcggtgatgcggcgttgttggtgttgattgaagtcgaagagtggctgccgccggagttgccctgaggagttgagcgcgttgcgccaggtacgggtaatggcaggggcgaatgcccctgcctggtgtatctaagggttacaactcattcagtatgtactggaaccggcaagtagaatcgattggctgcatactgctggtatcaacacgcacgaccatatcgtgtaactgtttgtccgttatagggtgtcgatttggcgtgacgctgacttccgccttgtcacatccgctcgcggtaaaagttatcatctgtgcaacccagcggcagtaaccacctgtttcattcatctgcgtactgtcgcacaacttcccatctttcatcaaatacgtactaagcgttttctcaaccacaccgcccgtgctctgcagggtgagcagtttactcttactgacataattctcattccaactaacgtcataaggttgaacagaaacggatggacaaatcgtgtcgtgactatcaggcccctgatacgtcacgccccctggagaggcttcagagtcattcataataaccaaccatggacaagaaaagtaagattcaatctctgcagagacaataacctcaaatgtataatacccgcagttccacccagacggtaatccaggacaacttgctttgttgatattttgatggtagccaatcagcttaacgctaggggcaggaggaggaccactccagctcacattttgcaatatttccccagtcatgagccattgactacttttatattcaccaacgtacactgcggatggcatcattatttttaaattaaaagtcgcaatattacggctatcaccgttgtaaccgtagtaaacgtcaacgctatgcccggcagccatagcttctgtagtagcaataagcatgaccagagcgaacaaccatcgtagtattttcattttaaatatactcaaatgtcgcagttaaagaggcggtaaattcaccgatcgtcacatcacggccgcttttcgcctgtagccaggctctgaaattgatatcgttattgccattggttagcgcaaaggtcgccccatttgtattgttgatggcaacctgcattccgtcggttttttccatgccaattcccactccctgagcggtactactcgtatccagtgccagaaaaccgggttgttcgctgtcttctacccccgtgagcgtgacttttacgttgtatcccgccggccctttgcaatctttcagcttaaagactacgggtacacgagcggactggcctgcaacgttcaaatcctgacgactgaccgtgggaaagcgcacctctgccagatattggccatccaccaccagcgcacaggatttacttaataaattaccggagaaatgcagattattatctgccgcgaataacgtgctactcattgccaatatcagccccgctaacaggacgtaaccaccggactgaatcatacttttattcattgataatccacccgtaatgttgcgtaagcgctaaaattcgtatcgcttaacacagcatcactcgcttttaccggtacggcctccagcttcggcttttgcgtaaaatcagtggcgttgatagcaagcggagtattgagtttaaaacgctgaccatcgtgctgaagctcgataccaaaaccgggtacatcagtttcaattgctgcatcattaaaactggtttgtgtaccagtccaggtgagggtcatctcccaatctggatgacgggtcgtgctgtcacaagtgagttcatatggcacctctttacgaccatagttgccgttgatgtcgtcgataatgagatcgcgaaattcgacttcaatggttttaccaccgctgatgctacaggttggcggactcaataatgtcccgtgaaaggtgatgtcttcatcagcagcatgagctatggcgctactgacacaaagcagggttaagaaagtctttctcattgatagtccaccaccatggtcaaactggcgttaaactcgcccgcagcaagttgcgccccgcttgccttcacaggtacagccttcaactgtggctggttattgatattaaatggcgtccagctattttcaccgacggcaaacaaactgttatcggcgctattttctatccgaatgcccagcccggtgatattggtactgagtaccgtttcgccgttaatcgtactggtattgcccttaagttgcatccgcaagtcgttagcaagactgtttgtgcagttcaacgtgtatttcgcatcttgccgataattggtgccatcaacgttatcagcaatcatattgccgaactctacctggctgcccttgatactacagggtggcggagcatcgaccaacacgcgcagaattaaatccacgggtttactaccagccatagcagataaactacagacactgcataccagcagccctgcgcccactacaaacttttgactcataactccccccgtcatcagcctttgcggctctgctcttcatccacctggcagctgttgccattgcactggaagaacagcggcatccgtgcgccaaagtcgttgacgtaagtcagcaccggtacgctatccattttcacattcagcggtaccgtggttttcggctcaatgaccagagggctgaaccctgcagctggattaccgtttttctgcgcactggcgttgctgataatcacgtagtacggcgttgggttattgacggtaaatgcctgaccgctgcgggtgagcgtcaccttgtgctgccacggacttttcatactgaccttttccagcgcctttggtcgccagaacaacttgatacgcgtttgcagcgcgatttgcagggtattgggtttgttactttttggcgggatctcgcgcacgttaaagtagaacatgctttcacgatcggctggcaatttgttgatatccggcattccctgcacttttacctgcccgttcatcatactatcgatgcgttgcactggcggcagcacagttaacgggctggtgatcttgttacccttttcatcttcaatccagctttgagccagataagggagtttcggatcgttattacgcagcgtcacgctgatacttttgtcgctttcattaaatatcaaacgggtacgatctggcgttacagacgccagggcagacaaactggtagcgctaagcagtaacgccagcgtcatagcacccaatttggcagagcaaagtaaatcagacatggatcattccttaatcacgttattggttagcactaacagaaacagggggatcggtgggtgtcacctgttgcgtctgctcctgaatgacaggctttatgtcatcaggaacaaccggcgcgacgttgcctttatgctggcatggcagtaacaagccgttaaacagatcggcaggcagcgggtccggcaggttgatatcgcaatgcgcaacaccactccagaacacactcatatgttcgccaggtttcaccccagccagatagacactaccgtcatcatcgacaaggcccactgtctgctcgttatcattttttacttctgcgccaaacggtggatggctgccatcttgtaaacgcagcaccgccatcgctttttgaccactgatgacggcaaatttgcggtagccaatggctccttcagttagcgtggcttgcaccacgctctgggttgcttcggcgttttccggcaatttgttgaggtcgatatacgcctgattgcgataataattgttaacgtcagaaacgacggctttaccaaacatattggtataaacagcagccccgttaccttccaccggaacatcggcaacgccatcggcatcaatcagcaggcgtgtcccgcccatattctgggtacggtgaagtgcgccgccgtgggtagtaagcgttgcgccgccctgtaagctcaagcccgcagaggtgtattgcccttcatggtagttcgcactgaggtcaacctgcgccaggctaccatcatggctgtagtagccatcaacgctggtgtgtttgtcactggtgccgatgttcaactgatagtgagtcgcgtcatcgacacggctaaaataaccgacctggctgctgtccgtcccactgccatagttgccgttatagctaacggtactgttgtcgccccacggcatactgagcgaaatttacatgcccttatccgcccggttgtcatactcgtagcggtagccagtcagggaaacgctcatattacgaatgctgcccatattgaaatagtgggagagcatgatgttgtagtttgtctgctcctcacgatcccagtaggtatggcgggtatagttgagataaacgctaacacccgcatcgcggaagttctggttataagtggcggtgtacatctctttgtcgttgcccgtacggaccatttcgctgtcactggcatccagatactcgctcatggtcataaagttctcttcgctgaagcgatatccagcgaaagtgacgcggctgttgagctggtcaaagtctttggaataactcacacggaaggagttaccgtccaggctacctttgccataagcggtgtctttatccagtttggtatggctatgagtaacatcaaacgcgaccgcgccgaaggtagacaaatcgcgaccgacgcccagcgccgcagactgatagttttcatcacccagcgcaccgccatataagctccagccgttagcgatgccccaggaggcttcagcaccagagaaaaatcccccctcgacatggtggccccactcttgcggacgtcccatcatgatcttatagcgaacctggcctgggcgagtgaggtatggcatgctggcggtgctgatgtcatattcctgcacctggccgttctgttcttcaatgcgaatatgcaacgtaccggagacggaatcaccaagatcctgaatacgaaacggtccagccggaacctgcgtttcgtaaatcacacgccccatctggctgacggtcacttttgctgtggtgtgtgccacgccggaaatgtctggcgcgtagccgcgcagattgggaggcaacatttgatcgtcagtgctgacactgccaccaacataattaaaaccgtcgaaaatatcggaattgaggtaatcttcgcccagcgccagtttggcttttaaactcggtaacgcccgccaggcataatagcgactccactcccattttttttgtgtgtcatcgccgccaaattcatcgtcatcatcattactgcgcgtatgttgatagttggtctgccagtcagcgcgcatacgccatggccccaggttaaccccgaccgtcccgttgccgctgatctcgttactgtcatcgccgccattttcttcgtgtcgtgtttgcgcagtgatgctgtagtccgcaatgatcccggagatgccatcatcccaacgagaaggtggatcccagtcgggccaggtatattcgaggtaagcctgcggtagactaatgactaatgcggactggcttaaatcagccttaatttccacgccttccagttgaccgggcttcaggcatttaccatcgtggctccattgcagatttttcgccacgtcttcttttaaaccaaactgcgccaccagttccggtgtcagacaagcatagcttttgctaacgtcatcttcaccagcataccagtaaatatcgtactcttccgccaatggctgtttatttagttgaacctgtaaattgtattttccgggctcaacatacccctggctggaaaaacgcttcagatcaatttttgtgtcgccttttaattccagaaaacgggaatcaaactgaatgtcgtcttcagcccagacactgctataactcccactcattgccagcgcaatgcaccacggaagaatccgtaatcgaaaaagagaatggtcaggcatacacgtttttatccgtttttattcttgttcggtcaaaatccatttaaataccccatagcagtgtcgctatgggggtatgccttacaggtaagtaatctggaaggtggtatttgcttcgaaattacccagatctggcgcatcagctgcgccgaccagccaggctttaaagttcagagtctgcttcgctttgcctttattagtggcagtatctttcacgattttctggtcaatacccatgccgcttttgtaagaggtacccagagagtcaccgatcgccaggctaacattgttaaatgccgcaccggtatcggtattgaaaatggtgtaataattgccgctatttgcagaagaaacggtaccagtaaaggtagtggtcattgtttcctgagtatcaaatacgcaatcttgcaggcgaatctggaaatttttcggcgtggtggtgccgttatttttcagtttttcggcaccgatatcacccatatcaacttccagtttgtgatcgtccggaacgatagaacacacactgtcttcaatggtgccgtaaaaacgtgcagtaccgttgttacccgcagcgattgttgccgtagaggtgaacgcgcccatcaccattgccgcagcaatagctgttttaacaaacttactcattatttgtccttaaactataaataattaaaatataaacattgcaatacattgattcagtcaatagccaatgtttatacccagccattgaatacggcatgcgatccaaaaaaacaggtcgtaaaaaatgtattcgttggtgtggggtcgaatagtgatgttttcactcccctgattcaatttaattttactaatgagtaaatgtagatttaattaatatattgataggggaaagattatcttaaggatcttctaaaaaaacacgaaatatatatttagaaaaaacaggaagcatatcaacaatgaatgccaatagcttaaaaaacaaacaatgaacatataatgcgattggcattaacccgcttttgtcgatataatatataaacactatagccagaatttaatcaagtttcaattacgtcctgcctgattattcaactctattttctccattatctgtattaataaatgataatgagtgtcaaacagacattattcatttcaacatgtaactttgggcaaaatcaagatacgcgcagaagaatactttccgaatgaaagttaaaggtgttttatttatagatggggagagtcttcgatagtagtgaggttgacagatatccgctgcctgatgagcaattatgcccaatgaatctacctcattgggcataatttggaactcatcagatagcttttgccatcttcagattacacgggctcatctgccagttgaatgtgccgtttccgctttcatcaagcgttacgctggcaatggcgctggtggtaaacataggcggcgtttcgcccggacataactcggcaaccagatacccgactaacggtaagtgagagatcaccagtacgctagcaacaccttcattggtcaacgcctgcaaataggcactgaccagaccaacatcgccgcagggcgttaactccggcagaacttctgcactggaaggcaggttcagacaatcccctacttcttccagtgtttgctcggctcgcaggaacgggctcaccagaacgcgttcgatttccactttttgacctttcagccagttcgccatcaggcgagattcgtcacaaccattagtggtcagaggacgaacggaatcactggcggcatcgagggctgcgtcgccgtgacgcatgataaaaacttgcatattgcaccgcttttgttaaccagattcgcccgttttctttcatctgaaaccagagaaagaaaacggtggccggcattgtgccttatccattcaccgaatgaaacgctgttttttacctcaatggcgtaagtatagtcaatatgcgtttacattttgaccaacactccgccattcagcgcggattcatatagctttgaccttcttattgcaggtcagttgcagttgttttccaaaaactttccccacgcgcgcccatctcgaccaaacgctcgcaaggggtaaaacgggaaccatactgcgtggcaagtcgttgcattattgcaaccacttcgcccgcgccgagagaatcgatatagcggaacggtccaccgagaaatggcggaaaaccaatgccaaataccgcgccaatatccccgtcacgcacgctacggataacctgctcatcaacacaacgtactgcttcattcagcatcaacatcacacaccgttcagcaacctgcggtgcggagattcgcccctgcccttgtgtgccaatcagcgggtaaatggcgggatcgacctgttttttgcttttacgccctttctgaccataaagatagaaaccccggccattttttctgcctttgcgatcgtcgttcaaaatactagaaacaacatttgcaggcgcgctaaaacgttctccataagcggcttccagtacaggaataattttagtcccggtgtcgattcctacctcatccaaaagttggattgggcctaccggaaaaccaaatttcactagcgcggcatcaatgtgctctacccgttcaccttgggtcaacatgcggatagcttcattaatgtaaggcgctaagatgcgattgacgtaaaaaccggctttgtcacgcacgacaattggcgttttaccctgttttttcgccagttttactgtggtagcgatggtttgcgcgcttgtccccgcatgaggaataatctccaccagcggcattttttccaccggactgaagaaatgcaggccgataacttgctcaggtcgcgtggcgtgagcggcgatatcaccaatcggtaaagaactcgtattgctagcaaagatggtatgagcggcgcaattttgctcaacttccgccaccatctgttgtttcaattcgagattttcaaacaccgcttcaataatcagatcgcgatgggcaaagccgcgatagtccgtcgttccggagattaatgccagctgtttgtcacgttcgctggctttgagatgacgacggcgaactttgccctccagctgatcccaactgtacttcagcgcatgatttatgccctgcgggttgatatctttaattctgaccggaatccccgctttacaagcagtgacataagcaataccgccgcccatcaagccaccacctaaaatccccacgctgtttaatggcgcaggcggcgcatcactgccgggatctttcttcacgtccgtactggcaaaaaagatactacgcagcgcctggctttgtggcgtcatcgccagttcgccaaacgcccgagcttcggcgtcataaccgctgctggtgccctgcgctaatcccgtttcaacaacctccaggatgcgttctgtcgccggataattgccttgagttttgtgttctgttttcttgccgaccattttgaacagcagcgcacgacctaacggccccgccagaatacgctcgcgtacaggtagagggcgggaagatgggcgctccttctttgccagctcaacagcggcttccagcagaatggagtgcggaacaacgtcatccaccagccccagctttaatgcctgtttcgcccgaagttgttttccggtgaggatcatctctaatgctgtgctgacgcctatcagacgcggtaaacgctgggtgccgccactaccgggtaacaatccaagttgtacttcaggcaaaccgagcaccgttttaggatcgtcagtacaaacgcgaccgtggcacgccagcgccaactccagcccaccacccaggcaagcgccatgaatagccgcgataacctgaatgggcaaagcatgaatctccgccatcaactgttggccctgccgcgccagagcttccgcttcttgcgccgttttgcagttgccgatcatgttgatgtctgcgccagcaatgaagttgtccggtttagcggagacaaacaccacgcctcgcaactctttgttttcacggagttgcttaataatggcgcgcacctggctggcaaactccgccttcagggtattcattttctcacccggtacgtcgatggtgataacggcaatgttgtccagacgaacattaagggtaaacgcacttgtcatttccattattccgcctccagaaccattgccgcgccaagcccaccggcagcacaggcggtaactaaaccaaatccaccgccgcgacggcgaagttcatgcaatgtctgggtaatcatccgcgcgccggtcgccgcgaagggatgcccgtaagcaatgctaccgccaagcacgttaaatttgctatcgtccacttcgccagtggcatgtgcacgccccagtgcttcacgagcaaaacgttcactacccagcaactgaatattcgccagcgtctgagctgcaaaggcttcgtgcatatcgatcaatgtcagatcgctcatcgtcaaaccggcacgctccagcgccagcggtgtactccaggctggaccgagcaacatgtcctgccagacatcaatcgcagtaaatgcgtagctgcgcagataccccagcggcaccagccctaattctttcgcccgggattcagtcatcaggatcaccgctgccgcgccatcggtcagcggcgtactgtttgccgccgttaccgttccgtgtttgcgatcaaacgccgggcgcagctttgcgtaatcggcaaggctggaattaccgcgaatattgttgtcttcgacaagcggttgtttataaggagggataaaggcagtcatcacctcttctttgagttttccgtcactccatgcctgagcggcacgctgatggctacggtgcgctaatgcatcttgctgttctcgggtgatgccgtaggttttcgccatttgctctgcggtgtcgcccatccgcaagccggtagaatattctgctaccgcaggtggtacgggcattaagtcgcgcaaacgcaggcgagagaagagtttcagtcgctggctcatggtacgagctttgttgacatcaaccagcacgcgcgccagttttttactgacgccaattggcaatacgctagaggaatctgccccaccggcaatccccgctcgaatagttcccgccatcaggctttctgcgacgtttgcaactgcctggaaactggtagcgcaagcgcggctgacgctgtaagcatcggtatgtacattcattcccgtaccgagaacaatttcacgcgcaatgttgggggcttcaggcatttgtacgacctgaccaaagaccagttgttcaatcacttcggcggggatctcgctgcgtgccagcagttcgcctaccaccatcttccctaaatcaaccgcgggaatgccatgaaaagccgtcgcctgacgggcaaaaggcgtacgtaaaccgctaacaatggcgatacgatcgccctggcgggtaaccagcggtaaaacctgacccataacactcccctgtaaaaaaataaataaagtggtctgacctgatcatagtcttaaccatttttttacatttagccaagtggagaaaagggaaagtgggagctatgacacagagagaaaagaagaagagaaaagaaaacgcccctgccagcaactgacaggggcgtacgtacccgagaggaattaacgcagacccagctggaaaatcagcatttcagcttcgcaggcaaaagtgaaatcgatatccaggcgcacaccgtcagactcttcagtgaaagtcggggtgattttgcaaggttcagattccacgctacgggctttttcagtcagcgccgccagcgtttgctctgcttctgcgcggtttgcaaacacgcggctgtaagacgcggtgcagtcggagttgtccataatggtgccaacatccatacagcagcaaaccggggtttcatcagcactacatttactcatcgttgatttcctctgtatgtgcacccaaggtgccagataaacgttgtggatattttacgcttccggaaagtgctgctccagttgttaattctgcaaaatcggataagtgaccgaaatcacacttaaaaatgatctaaaacaaaattcacccgaatccatgagtgcgccacctccaaattttgccagctggatcgcgtttcttagatcatatttgaaaaaagatagaaacatacttgcaacattccagctggtccgacctatactctcgccactggtctgatttctaagatgtacctcagaccctacacttcgcgctcctgttacagcacgtaacatagtttgtataaaaataaatcattgaggttatggtcatgagccagaaaaccctgtttacaaagtctgctctcgcagtcgcagtggcacttatctccacccaggcctggagcgcaggctttcagttaaacgaattttcttcctctggcctgggccgggcttatagtggggaaggcgcaattgccgatgatgcaggtaacgtcagccgtaaccccgcattgattactatgtttgaccgcccgacattttctgcgggtgcggtttatattgacccggatgtaaatatcagcggaacgtctccatctggtcgtagcctgaaagccgataacatcgcgcctacggcatgggttccgaacatgcactttgttgcaccgattaacgaccaatttggttggggcgcttctattacctctaactatggtctggctacagagtttaacgatacttatgcaggcggctctgtcgggggtacaaccgaccttgaaaccatgaacctgaacttaagcggtgcgtatcgcttaaataatgcatggagctttggtcttggtttcaacgccgtctacgctcgcgcgaaaattgaacgtttcgcaggcgatctggggcagttggttgctggccaaattatgcaatctcctgctggccaaactcagcaagggcaagcattggcagctaccgccaacggtattgacagtaataccaaaatcgctcatctgaacggtaaccagtggggctttggctggaacgccggaatcctgtatgaactggataaaaataaccgctatgcactgacctaccgttctgaagtgaaaattgacttcaaaggtaactacagcagcgatcttaatcgtgcgtttaataactacggtttgccaattcctaccgcgacaggtggcgcaacgcaaagcggttatctgacgctgaacctgcctgaaatgtgggaagtgagtggttataaccgtgttgatccacagtgggcgattcactatagcctggcttacaccagctggagtcagttccagcagctgaaagcgaccagtaccagtggcgacacgctgttccagaaacatgaaggctttaaagatgcttaccgcatcgcgttgggtaccacttattactacgatgataactggaccttccgtaccggtatcgcctttgatgacagcccagttcctgcacagaatcgttctatctccattccggaccaggaccgtttctggctgagtgcaggtacgacttacgcatttaataaagatgctagtgtcgacgttggtgtttcttatatgcacggtcagagcgtgaaaattaacgaaggcccataccagttcgagtctgaaggtaaagcctggctgttcggtactaactttaactacgcgttctgataacgcgttcgcctggataaagtcacctgcatagcaggtgactttaactcccccacttcaccgaaagtagtgtcctcattgcttacctcctgagttttgcaaacagcctgttggcagcttgccctttcaaatcaataagcggtatccacagacaaacctgaagggaaaggcatattttcaggcgttctgctcgtccttctcaaagagtttacttttctgcatttccaggatactccccccccctggctattgtgcgctcatacactcaaattaaagataggttctaaataaatgagcgttttttgatagtctatttcattaggtaatatatatttgtaacaaatcaatcaaaatggaataaaatcatgctaccatctattagtatcaacaataccagcgcagcttacccagaatccatcaatgaaaataacaatgatgaagttaatggattagtacaagagttcaaaaacctttttaatggtaaggaaggaataagcacctgtattaaacatctacttgagcttataaaaaacgccatacgagtaaacgacgatccttatagatttaatattaataattccagtgttacttatattgatattgactccaatgatacagaccatattactattggtatcgacaaccaagaaccaatagaattacctgcgaactataaagacaaagaactcgtccgtactatcattaatgacaacatagttgagaagactcatgatatcaataacaaggaaatgatcttcagcgcattaaaagaaatatatgatggagatcctggttttatcttcgataagataagtcacaaactcagacatacggtaacggaatttgatgagagcgggaaaagcgaaccaacggacttatttacctggtacggtaaagataaaaaaggcgactctctcgctattgtaattaaaaataaaaacggaaatgattacttatctctcggttactacgatcaggacgactaccacattcaaagaggaattcgtattaatggtgatagtctcacccaatattgtagtgaaaacgccaggagtgctagtgcgtggtttgaaagcagtaaagctatcatggcagaaagttttgcaactggttccgatcatcaggttgtaaacgagctcaacggggaaagactgagagaaccaaacgacgtttttaaacgttatggtcgagcaataagatatgattttcaagtggacgatgcaaaatataaatgcgaccatctaaaagaaatagtttctactttagtcggtaacaaaattaacgttggccattctcaaaaaatatataagcattttaaggatctcgaaggtaaaattgaagaaaggcttcaaaatcgccaggctgaatatcaaaatgaaattaatcaaccatctgcgccaggtgttaattttgatgatatttaaaattatttttccagttttttgatttttcaacagctgaatatcggaaatagtcagtgacgaacatcagtatttttacataattacgtctaggtcattgtcggtttatctccttttacttgtggtaattgagggataacaacaaaaaaggtgagttttgcgactcaccttttttatttgtttcttattcagaatcaatatcttttaaatcatcctgaatcgcttgtgcgttcggattttcctgcggtttgagttcgccgccattagcgatgaaatcatgacgctggaagtacgcttcgcgcaccataatataaggatcggagctctgacgcagcagaccatcggaatccagcagctgagcgcgggtttcgatcccttcaagcgtccatttacccacagacatcggccaggtcagccaggaaagaaccgggtaaaaaccatccgccatatcaccaccgtcatcacgcagcgtgaagctaccgtagaacggtaactgaacgtaaggcccataacccacgccataatgaccaagcgtactaccgaagcggtgaggttcagtccgttgcagtttcgggttcgccatccctgcaacatcaataaaaccgcccatccccaaaatggtgttcaggaaaaagcgggtaaagtggaccatcccctgataagggtcgccctgcaagaagtagttaaccatcaccgcaggttcttcaaggttgccagtaaagttgctcaaaccgttacgcgccggttgcggaacataatcacgccaggcgacagcgaccggtcgaacaatatacgggtctaatacattgaagttgaagttgtacatggtgcggttgaacccttctaacgggtcagaacgcccttgctgatctgtaccggaactcgcacaccccaccagaagcgtagttcccagagcaagcgcgctcaggcgaagcttcataaatgtctccctgtttttttatggcttatgcagtttgccatccatgacggaacgataccgtatccgcctgtttaggtgtgggcgattgtaacagcacgtcaactgatgtccagacgccctgatttgctgatttgatcatagcctggtaatcgccgccctgtaggctacttgattctatagaaacagaaaaaggcaaacgcagccttttctacattttcagagtaactcccgtcagttgcgagcaaaaaagccgctacgctttagctatacgtgctaattcaagagaagagaccatggacaacgacaaaattgatcaacacagcgacgaaattgaagttgagagcgaagaaaaagagcgcggcaaaaaaatagaaatagatgaagaccgactcccctcccgggcgatggcaattcatgagcatatccgccaggatggtgaaaaagagctggaacgcgacgcaatggcgctactgtggagtgccattgcggcgggtctgagcatgggcgctagcttactggcaaaagggatatttcaagtcgaactggaaggtgtgccgggcagcttcttgctggagaatctcggttatacctttggttttattatcgtcattatggcccgccagcaattatttaccgaaaataccgtgactgcggtactacccgtcatgcaaaaaccgacaatgagcaacgtcggcttacttatacggttatggggcgtcgtgctgctgggtaatattctcgggacaggtattgcggcgtgggcatttgaatatatgcctatcttcaatgaagaaactcgcgatgcatttgtcaaaatcggcatggatgtgatgaagaacacccccagcgagatgtttgccaacgcgatcatttccggctggctgatcgccactatggtttggatgtttcctgcagcgggtgcggcaaagattgtggtgattatattgatgacctggcttattgccctgggtgacaccacccatatcgtggtcggttctgttgaaatcctctatctggtgtttaacggtacgctgcactggagcgatttcatctggcccttcgcactacctactttagcggggaacatctgcggcggcacctttatcttcgcgttaatgagtcatgcacagattcgtaacgacatgagcaataagcgtaaagcagaagcacgccaaaaagcagaacgtgcggaaaacattaagaaaaattataaaaacccggcataaatggcgagggtttaagcaatcgagcggcagcgtacttaccccgcactccattagcgggtatactcatgccgcattgtcctcttagttaaatggatataacgagcccctcctaagggctaattgcaggttcgattcctgcaggggacaccatttatcagttcgctcccatccgtaccagtccgcaaaatcccctgaatatcaagcattccgtagatttacagttcgtcatggttcgcttcagatcgttgacagccgcactccatgacgggtaaaaagtggataaaataattttacccaccggatttttaccctagagccatacagcctcacactcgatgaggcctgtcagtttcttaaaatatcctgatctaccatcgccgtcatagagcgtatttttattacctgatttgcaggttcgattccctattcggagatagcactcatgcaacacgaactacagcctgatagtctggttgatttgaaattcatcatggctgatactggctttggtaaaaccttcatctatgaccggattaagagtggcgacctgccaaaagccaaagttatccacgggcgagcaagatggttatatcgtgaccattgtgaattcaaaaataagctcttaagccgcgccaatgggtaaaatagcgggtaaaatatttctcacatctaaaaaacaccattccaatcaatcccctgctgcttcaagtagatgtctgcaggggacaccatccttgtgtttatccctaaaaccacataaaaaccgtaaattaaattcgaactagcaggccgaataaggcacaccaggaactcgtggttttattcattaactagtggtttttacctgttctcttagccagataataaacgcttcaatttttggccactgcctgcccggtaatgtggtgatgtaataatgctgatggcatttcaccgtcatatcgccaaacggcgcgacgagctcaccactggcaagccttttttgtaccaggcgttttcttcccatcgccaccccaatatgattcatcgcggcaataacagctaaatcagaacgatcaaagccaattccagaagatgtcggcaaattaaccgcataatgttgcgcccaactatgccattcatccgtaccggagtcgttgctccatgcctgtctgtcatggagcaacgtacagtgacacaggttaattaccgtgttggttaaagcatgtctttgagcgtattccgggctacatactggcaggatttcttcatccatcagaaagtgatgagtgagttgcgcactcggcgcatcatcaaagtagatcgccaaatcgattccggcacgttgcagattgacgttgtcattaccagtgagcacggtgaggctaatagacggataccggcgtgtaaagtcacctaatgcgggcaccaaccagcattgggcgatagagggccgggaatacagagttaacgttccgcttaactcctgatttttgatatcaagaatttcctggttcagggtatccaggctgctttttagcgcccaataaacacgtttcccctcgtgcgttaattccactttgcgatgggaacgaacaaacaactgaatgcccaattcttcttccagctgattgatacggtgacttaccgcactggggctcaggctcaattcctctgccgccagggcgaaggactgatgcctggcagccacttcaaaagtatgcattttacttaattgccagccgttaagcagccgatttcttatttcacgaaggggttccataatcacctcatttttcgcttaagtgtaaaaaaatagcggcaaaatttcagctatgagatgagctaaagtgaaccatatctcaattcaccttcatttttagatgtaaatcactccattgatgcaatttacctcatgtgaaaggcaaattttatcgtttgtcagcctgcgttgtttttttgtccaatatcatcaggttaatcacaggggaaggtgagatatgcactctcaaatctgggttgtgagcacgctgcttatcagcatcgtgttaattgtactgaccatcgtgaagttcaaattccacccgtttctggcgctgttgctggccagcttcttcgtgggaacgatgatgggcatggggccactggatatggtaaatgctattgaaagtggaattggcggaacgctggggttcctcgcagcggttatcggccttggcacgatactgggaaaaatgatggaagtatccggggccgcagaaagaattggtctgacacttcaacgctgccgctggcttagtgttgatgtcattatggtgctggttggcctgatttgtggcatcacgctgtttgttgaagtgggcgtcgtgctattgattcctctggcttttagtattgccaaaaaaaccaataccagtttattaaagcttgccattccgctatgtaccgcattgatggcagtgcactgcgtggttcctccacatccggctgctttatatgttgccaataagctgggcgcagatatcggtagcgtgatcgtctacggtttgctggttgggctgatggcaagtctgatcggtggcccacttttccttaaatttctgggtcaacgactgccctttaaacctgtacccacagagtttgcagatctcaaagttcgcgatgaaaaaacactaccgagtttaggcgcaacgttattcaccatactgctacccattgcgctgatgttggttaaaacgattgccgaattgaatatggcgcgtgagagtggtttgtatatcttggttgagtttattggcaaccctatcactgccatgtttatcgccgtgtttgtcgcctattatgtgttgggtatacgccagcatatgagcatggggacgatgctcacacatacggaaaatggcttcggttctattgctaatattttgctgattatcggggccggaggcgcattcaacgccattttaaaaagcagcagtctcgctgatacgctggcagttattctctccaatatgcatatgcacccgattcttctggcctggttagtggctcttattctgcatgcggcagtgggctccgctaccgtggcaatgatgggggcaacggcaattgttgcacccatgctgccgctgtatcccgacatcagcccggaaattattgcgattgctatcggtagtggtgcaattggctgcactatcgttacggacagccttttctggctagtgaagcaatattgcggcgctacgctcaatgaaacatttaaatactatacgacagcgacatttatcgctagtgtcgtcgctctggcgggcacattcctgctgagttttatcatctaagcgcaaagagacgtactatggaaaacgctaaaatgaacagcctcatcgcccagtatccgttggtaaaggatctggttgctcttaaagaaaccacctggtttaatcctggcacgaccagtttggctgaaggtttaccttatgttggcctgaccgaacaggatgttcaggacgcccatgcgcgcttatcccgttttgcaccctatctggcaaaagcatttcctgaaactgctgccactggggggattattgaaagtgaactggttgccattccagctatgcaaaaacggctggaaaaagaatatcagcaaccgatcagcgggcaactgttactgaaaaaagatagccatttgcccatttccggctccataaaagcacgcggcgggatttatgaagtcctggcacacgcagaaaaactggctctggaagcggggttgctgacgcttgatgatgactacagcaaactgctttctccggagtttaaacagttctttagccaatacagcattgctgtgggcagtaccggaaatctggggttaagtatcggcattatgagcgcccgcattggctttaaggtgacagttcatatgtctgctgatgcccgggcatggaaaaaagcgaaactgcgcagccatggcgttacggtcgtggaatatgagcaagattatggtgttgccgtcgaggaaggacgtaaagcagcgcagtctgacccgaactgtttctttattgatgacgaaaattcccgcacgttgttccttgggtattccgtcgctggccagcgtcttaaagcgcaatttgcccagcaaggccgtatcgtcgatgctgataaccctctgtttgtctatctgccgtgtggtgttggcggtggtcctggtggcgtcgcattcgggcttaaactggcgtttggcgatcatgttcactgcttttttgccgaaccaacgcactccccttgtatgttgttaggcgtccatacaggattacacgatcagatttctgttcaggatattggtatcgacaaccttaccgcagcggatggccttgcagttggtcgcgcaagtggctttgtcgggcgggcaatggagcgtctgctggatggcttctatacccttagcgatcaaaccatgtatgacatgcttggctggctggcgcaggaagaaggtattcgtcttgaacctagcgcactggcgggtatggccggacctcagcgcgtgtgtgcaagtgtaagttaccaacagatgcacggtttcagcgcagaacaactgcgtaataccactcatctggtgtgggcgacgggaggtggaatggtgccggaagaagagatgaatcaatatctggcaaaaggccgttaataacgtttcaacgcagcatcgcaatcctttccctgggtgagcgatgctgccgatggcgcagacttaagatccccggtcttacccgctataaccccctccttttatcatcacccaacgcctttcgctgtaaacggcggtttcgcaaaccaaaccaaaaccgtaagtaagataaaagcaatagccgccatacggaaaatctcatttgcagaaatagaaagactctgctgggttatttcattattaatttcattaagaactccactaaggctaccataatatttatccataatttgactgctactattaaacacggggttaaattgatcgatggttgctgtcaactgactatggtgtaagctttcgcgtcgtccccacagcgtcattgtcaagctcgtaccaacacttccactcaaggtacgaaaaaaattactcatactgctggcattggcaaatttattatctggcaagccactaaagctaatcgttgttaagggtaaaaagaaacaggcaacggcgaatccctgaaaaaactgcggcaaaatgatgcctgtaaaatcaatcgttggcataaatgtcacagaacgccagtaatagcaaaccgcatacatcaaaaaactaaatgtcactaacaaccgcatgtctattttgttgccataacgtcctatcaaaggactaattaatagtggcatgatgccgatgggcgcataagcaagtccggcccatatcgcattataccccatcgtttcctggagtaactgcggcataaggacgatcgctccagagtaaaataaatacgcgcatgtgatactcacaataccaatggtgaagttacgggacttaaacaaactgagatcaagaatcgggttctcactggtgctctcccaaatgactaaagagatcagagaaataacacttactactgttaatattattattgtactgctgttgaaccaatccagatcgcgccctttatcaagcataatttgcaagccaccaacaccgagcactaacagggtcagtcctggtagattcattttgaccggactagtctcagtttctcttcctttaagtaaggttaagcataatgtcaggacgataatccccatagggacattgattaaaaatatccaaccccagctaaagttatcacaaatataaccgcccaatatcggcccacatatcggagcgataatcacggtcatactccataatgccagagcaaatgttcttttttctggcggataattccttaataataaactctgactcagtggaattaacggccccgccattaacccctgaacgactctaaaaaatatcagcacatcaagattggtgcttaggctacacattaaactagacaggctaaaaaaagtgacactaagtaaaaataatcttaattcgcctattctttgtgccaacctgccagtaacagggatcgcaatggcatttgctacaccaaagctggtgataacccaggtgccttcgtctgtacttgctcccagaaagccagatattgtcggtattgcgacgttagaaatagtggaatccaacatttgcataaatgtcgctaaactcaatgcaatagtgacgcaccataacgtcccaccggttaatggtgccggagtacttttagtgattgccattaaagttgtccattatggctaataatgttgctaatttctttttctatcggactggtatcgataactaaagccttactggtataagccggcatggaggtcacggtactagccagctcaggcatctcggcaatgtcttcgttcttcgtatcaatagttgctgtcatgcttaaaccaatacgcaaggggtgttccatgagttcttttggatcaagagaaacttcaaccggtacacgctgaacgattttgatccagttccctgtcgcattttgtgcaggtaataaggagaacgcattgccggttcccatattgatccctgtcacccgaccatgaaacacaacattttcaccataaagatcgctgataatattgacgctttgaccaatccgtacatccgtgagttgtgtttctttaaagttggcattaacccacatttgacgtgccggtacgacagccattaagctttgtccggggctcactgtttcgccgacctgaacacttctctgggcaatatagccggtaaccggactcttaatatccgtacgtttaagcgccaaccaggcttctttagttgcatccgccgcttcaacgacttgtggctgacggtttaatggtgtgttcattactaaagctttattcgctttataagcctggatagcggcattcaatgccgctttgctacttattaacgtatctttggtatgctccagcgtttctttactaataaccccctgcttcgctaacggcactcgacggttataatcttctaaagattgttgatactgaatacgtgcactagcgacttcggcactgtattgtttatcctgtaagtatagtttattcgtttgccgaacaatatttgccagattatttttagctttattgagtgcgatagtggcatcagttttatccagactaactaaaatgtcaccttgtcgaacgtagttcgtatctttatgattaacgacagtgacactaccactgacttgtgcagaaattggatctgcattccccgtgacataggcgtcatctgtactaatcatgtcttctaattccatactccaataggcataggcaccactaaacgcaataaataaaactaccgccaataaagaaaagtattttcttctgttagaatgttttttattactattaatctgttccactattatctctcatttctcatagatgaaatttatgaattgaatgaaaagagcattcattcttcatatcaaacacagtgcatgtgttgcacattatcccaggaacgttggaggcctaatttaaatgaggtgcaaaaaaaacaacagaggactaaaccgtggcttttgcaatacaattcttacgcctgtaggattagtaagaagacttatagtgccaacttgaaactataaatcatcggtacaatccctgattttattgttgacatttcatttatgccgactatttatatggtatacttgtcgaattatcttaaaggaagctcagattttcttatttttattgagaaaatgagatgacgccttatgtctgtattactacagggagaagggagatgcttcattgcaaagggaataatctatgaacgcaataattattgatgaccatcctcttgctatcgcagcaattcgtaatttattgatcaaaaacgatattgaaatcttagcagagttgactgaaggcggaagtgccgttcagcgggtggaaacacttaagcctgatatcgtcatcattgatgtcgatatccccggagttaacggtatccaggtgttagaaacgctgaggaagcgccaatatagcggaattattattatcgtctccgctaaaaatgaccatttttacgggaaacattgtgctgatgctggcgctaatggtttcgtgagtaaaaaagaaggcatgaacaatatcattgcggctattgaagctgcaaaaaatggctactgctatttccccttctctctcaaccggtttgttggaagtttaacgtccgaccagcaaaaactcgactccttaagcaaacaagaaattagtgtcatgcggtatattcttgatggcaaggataataatgacattgctgaaaaaatgttcatcagcaacaaaactgtcagcacttataaaagtcgcctgatggaaaaattagaatgtaaaagtctgatggatctttacacattcgcacaacgtaacaaaatcggctaaccacatgaagtttttaccctatatttttcttctctgttgtggtctttggagcaccataagtttcgcagacgaagattacatcgaatatcgtggcatcagtagtaacaaccgtgtcacacttgatccactacgtctgagcaacaaggaattacgttggttagcgagcaaaaaaaatcttgtgattgcagtacataagtcccaaacggctacgttgttgcataccgatagccagcaacgggttcgtggtattaatgctgattatttaaatcttttaaaaagagcgttaaatatcaaattaacactccgggaatacgcagatcatcaaaaagcaatggacgcgcttgcagaaggtgaagtcgatatagtgttaagtcatttagttactagcccgcctcttaataatgacattgctgcaaccaaaccattgataattacctttccggcgctggtaaccacccttcacgacagtatgcgaccgcttaccagtccaaaaccagtaaatattgctcgggtagcaaattaccccccagacgaggtaattcatcaaagttttccaaaagcaacaattatctcttttacaaatttatatcaggcattagcatccgtcagtgctgggcacaatgattactttattggtagtaacatcattaccagcagtatgatttcccgctatttcactcactccttaaatgtagtgaaatattataacagcccgcgtcaatataattttttcttgaccagaaaagaatctgtcattcttaatgaagtactcaatagatttgttgatgctttaacaaatgaagttcgctatgaagtaagtcaaaattggcttgatacaggaaacctggcctttctgaacaaaccattagaactcactgaacatgaaaaacagtggattaagcagcatcccaatttaaaggtgctggaaaatccttacagccccccctattctatgacggatgaaaatggcagcgttcggggcgttatgggggacattcttaatattattaccttgcaaacaggtttaaatttttctccgatcaccgttagtcacaatatccatgctggaacacagcttagccccggaggatgggatataatacctggcgctatttatagtgaagatcgagaaaataatgttttatttgctgaagccttcataacaacgccttacgtttttgtcatgcaaaaagcgcctgacagtgaacaaacattaaaaaaaggaatgaaagttgccattccatattattatgagctgcatagccaattaaaagagatgtatccggaggttgaatggatacaggtcgataatgccagcgctgcatttcacaaggttaaggaaggtgaacttgatgctctggtcgcgacacagctaaatagccgttacatgatcgatcattactatcctaatgaactttatcattttcttattcctggcgttccgaatgcaagccttagcttcgcttttcctcgcggagaaccggaacttaaggatattattaataaagcactgaatgcaattcccccaagcgaagttctgcgcctgacggaaaaatggattaaaatgcccaatgtgaccattgacacatgggacctatatagcgagcaattttatattgttacgacattatccgttttattagttggcagtagccttttatggggattctacctgttacgcagtgttcgtcgtcgtaaagtcattcagggtgatttagaaaaccaaataagtttccgaaaagcactcagcgattccttaccgaatccaacttatgttgtaaactggcaaggtaatgtcattagtcataatagtgcttttgaacattatttcactgcggattactacaaaaatgcaatgttaccattagaaaacagtgacagtccctttaaagatgttttttctaatgcgcatgaagtcacagcagaaacgaaagaaaatcgaacaatatacacacaggtatttgaaattgataatggcatcgagaaaagatgcattaatcactggcatacattatgcaatcttcctgcaagtgacaatgcagtatatatttgtggttggcaagatattactgaaacgcgtgatctaattaatgcactcgaggtagaaaaaaataaagcgataaaggctaccgtagcaaaaagtcagtttctggcaacgatgagtcacgaaataagaacaccaataagctctattatgggcttcctggaacttctgagcggttctggtcttagcaaggagcaacgggtggaggcgattagtcttgcctacgccaccggacaaagtctcctcggcttaattggtgaaatccttgatgtcgacaaaattgaaagcggtaactatcaacttcaaccacaatgggtcgatatccctactttagtccagaacacttgtcactctttcggtgcgattgctgcaagcaaaagcatcgcattaagttgcagcagtacgtttcctgaacattacctggttaagatcgaccctcaggcgtttaagcaggtcttaagtaatttactgagtaatgctctcaaatttaccaccgagggggcagtaaaaattacgacctccctgggtcacattgatgacaaccacgctgttatcaaaatgacgattatggattctggaagtggattaagccaggaagaacaacaacaactgtttaaacgctacagccaaacaagtgcaggtcgtcagcaaacaggttctggtttaggcttaatgatctgcaaagaattaattaaaaatatgcagggcgatttgagtttagaaagtcatccaggcataggaacaacatttacgatcacaatcccggtagaaattagccagcaagtggcgactgtcgaggcaaaagcagaacaacccatcacactacctgaaaagttgagcatattaatcgcggatgatcatccgaccaacaggctattactcaaacgccagctaaatctattaggatatgatgttgatgaagccactgatggtgtgcaagcgctacacaaagtcagtatgcaacattatgatctgcttattactgacgttaatatgccgaatatggatggttttgagttgactcgcaaactccgtgagcaaaattcttccttacccatctgggggcttacagccaacgcacaggctaacgaacgtgaaaaagggttaagttgcggcatgaacttatgtttgttcaaaccgttgaccctggatgtactgaaaacacatttaagtcagttacaccaagttgcgcatattgcacctcagtatcgccaccttgatatcgaagccctgaaaaataatacggcgaacgatctacaactgatgcaggagattctcatgactttccagcatgaaacgcataaagatctacccgctgcgtttcaagcactagaagctggcgataacagaactttccatcagtgtattcatcgcatccacggtgcggctaacatcctgaatttgcaaaagttgattaatattagccatcagttagaaataacacctgttagtgatgacagtaagcctgaaattcttcagttgctgaactctgtaaaagaacacattgcagagctggaccaggagattgctgttttctgtcagaaaaatgactaaatagcggctcccacaatgttcaaatgtgggagctatttaccagcacatcttacatttaactactgaactcctggcgaatttgttccccatgctggtcgagcgttgccgctcccggcataacatgcgggtccgcgcagccgctgatttttatcggattacccggcatcattattcccccggcttcaatcaacatatttctcgcctgagtttgtggcaatttaatggcctcagccacacttaataacggcgcgacgggtacaccaacttcatgtattctggctaaccaaacttcagctgcctgcgtttttaacgtccgctcaatatattgtttaagaatagcctggttttgtacgcgtaaaatattgctgctaaatcggggatcattaaccagttccgtaagctccagtgcctggcataacgcagaaaaaagcttgtcattaccacaacaaatcgtaatcggcttatcctgagtattgaaaacatcaaaaggtgccatgtagggatggcgatttcccagacgttgtggactcttcccagttgcgatatatgccatcagaccatgctccagaaaactcagcgtggcatcaaacatcgctatatcgacatgcgcccctctctggctcttttcgcggccataaagtgcactcactattccgctgaataaatagacaccgccgcatagatccgcaagagatgtaccaacgcgcactggcggagcatcaggatatcctgtttccatcattatcccgctcattgcctgaatgatggtatcgtaggcaggagcatcttttagcggaccggtatgtccgaaaccactgctactagcatatatgaggcgcgggttgatttcttgaagcgtttcccaactaaaccccagtttttccattgtacctgggcgaaaattctcagctaatacatcagcttgtttgagcatatttataaatatacttttatcgtgatcattctttaaatcaagaaccacactctctttgccatgattaataaaactgtaatagagactctgtccatccacatagggaccaaatgtgcgggtatcatcaccatgacccggcggctcaactttaattacccttgcgcccatattacaaagaagttgagttccgaaaggtccattaaggacatgtgtcatatcgataactaataagccttcaaacggccctttgctttcattatttgtcatttgcttatgccttgaaaaaagccgaaggtgaaaagacacttcggcatttatgtaaaatcaataacatgattaattaactaaccagtcgactgacataaatccacaagggagccgtgacgacaaagcccagtacgctcacagccaaactcgctgtaccagtacgggtgtagacattaaaccggctggcaataatgattccggagaatgccggcggtaatgcgcctgccagtaccatcatctgcagatgttcgctgttcaaatgacatgccataccaacgagaagcagtgccagtggcatcagaatcagcttcaggaaggtgttataagcaatttcggcactgaactcgaatttatgtgcagccagagtcaaccccgcagcgaataccgctaccccactgttagccttcgcaatcagattaaaggttgggtcccatgctgccggaatttttaccccaaccaacaccaggatcgttgccagaacaggtgcccatactactggctcctttgccgcagaaattaatgcgctcagattactattcttcttaccatccgctccactagaaggattcagcaaatacagaccaataggaatagtaattgcgttaacaataatagaaataattgctaccactaaacctgtacttacggaatcaccataaataggatcgagaactgcaaaccccaggaatccaatggtaggactacctgcaattaatgcacatacagctgcttctgcatgggtacgtttaaaaaatttgtagcaaccgaaccaggagaaaaagaaacatccgacaataaccacaagacttacaagggtcagacgagtgtccgcaaaaatcatttccctgtttgcccgagtaatagatacaaatagagccgcaggaagcgcgtagtttaataccagtttattaaatgcccgagcttgatcttcactaaatgtttctcgtctgccgctaaaataacccaacagcatgattacgataataggcaataaatcgccaataaaaaatgttagcataatagtatttccgataagggtcccctcaccatcgcataatgagttggcaagaggagacgatgtcagtatttaattaccagcgacttgttttgggttaagtttggtaatatggccactttcagttcctgctgcagggtcgatgaccacattaataatggtcggtttgcggctctgaataccggtggttaaagcatgacgaagttcatctgtcgtggtgacgttatagccaacgccacgaaacgcatccattaatttgtcataccttgcatggtgcaacagatccgttggacttggtgcaccagcgccactgagatcaacaccgtctcctctgtagatgccgccattattaaaaataacgatcgtcaccggcaggttatatcgacaaatcgtttcaatttccatcccactgaaaccaaaagcactatcaccttcaatggcgacaaccggagaaccagaagtcacgctagcaccgatggcatagcccataccgatgcccatgacaccccaggtaccacaatccagacgacgacgtggtttatacatatcaataatatttcgtgcattatccagggtatttgcaccttcattaactaaataaatatcctggttctcgcgcaatacgtcgcgcacagcacttaatgcattaaagtaatttaatggttgagtatctgtacttaatttttcatgcattttttgtgcattttgctgcttgtggatatttaaaatatcgcgccataccagtggagtcgtaaatgtgttttgtttcagttctgccagcataccttgcatactggatgcaatatcaccaacgactggcacagcaatggggcggttgctgtcaatttcctgcggttcaatatccagttgaataaactgtgtatctgccgcccatccttttttaccgtgtgccaataaccaattcagtcgtgcaccaacaagcatgacaacgtcagcatttgccagggcaaagctacgcgcagctgccgcagaaagtggatgcgtatcttcaaggatccctttcgccatagacattggcaggaatggaatctgagcactttcaataaattcacgaagctgttcatcagcttgactatacgccgcgcctttgccaaggataattaatggccgttcagcttttgctaaaaggctaattgcgctagtgacactcttcgggcatggcaataatgctgggctcggattttcaactttaacaatcgtggttaacgcttcgtctttttccatcgtcgcggccaggacatttgctggcaaatcaagataaactccgccagggcgaccgcttacagagacccggatagcgcgtgccaatgcaatgccaagatcctgcggctgattaacgcgaaatgctgctttggcatacggttttgccgcattcatttggtccagctcttcataatcaccttgctgtaggtcgacgatcgcgcggtcgctggagccgctaatcatgatcatcggaaaaccatttaccgttgcgttggccaatgcggtcaaaccattgaggaatcctggcgcagaaactgtcaggcagatccccggtttttgggtaagaaaaccgcttgccgcagcggcatagcctgcgctctgctcatgacgaaaaccaatataacgaatgccttccgcctgggcatggcgtgccatatccgtcacaggaatacctacaacaccataaatagtgtcaatattattctgttttaatgcttcaacgatgatatgcataccatctgtcatttgaagttgatcactcatgattaataacctcgaaatttttataaattgggagccagaagcccccgttaatatcagatggcgtggttttgcttcattgcagcaatttcatcgtcgctataacccagctcctgcaatacagcagcggtatgttcacctaatagcggcgcagctttaatatccggcgtaaaggcagagaatttcattggacaaccaacggtcagatattttccacgcaacggttgttccacttcaacaacactgccactttggcgcaaagagggatcaagactaatttctttcatacttaaaaccggtgcacaaggaatatcaaactgagtcaaataggccaccgcttcatgtttatcaatagtgacagtgtatttttcgatttcagcaaaaatatcgaaaatatgtggctgtcgtgcatgggctgtactgtatgccggatcggtaatccattctggtttgccgatggctttacaggtgttttcccagttttgctcctgaatagtgaaataaatataggcgttaggatcggtttcccagcctttacatttcaggatccagccaggctgaccgccaccacctgcattaccaccgcggggaactgcatcaccaaatgtaccattcggatactgcgggtattcttccagataacccaatttatcgagacgctgctggtcacgtaatttcacgcggcaaaggttcaatacggcatcctgcatactcatggtgactcgttgcccacgccccgttttttcgcgatgcagcaaagcagcaagtaaaccgatcagcaaatgcattccggtgttgctgtcacccaacgctgcagcgcttaccagcggcggaccatcccaaaaacccgtagtggatgccgcgccacccgctgcctgagcaacgttttcataggcttttacattcacataagggctacactcatcaaaccctttgatgctaccaaaaatcagacgtggattgatttcttgaatatgctcccaggtgaagcccatgtgatcaatggcccctggatgaaagttctcgactaagatatcagcttcgcggatcagcttttccattacctctttgccttccgctgttttggtatttaactcaatagaacgtttgttactgttaagcatggtgaagtaaagcgcatcgatatcaggaatatctcgcagctggtgacgcgttacgtcaccaacgccgggacgttcaattttaataacgtcagcgccaaaccaggccagcatttgagtacaagatgggccagattgcacaccggtgaaatcgagaactttaattccttgaagtggagtactcatagcaatacctattagttaattaaatatgtgttaatttagcgtttatttaaggcgtaatatcttctataaataacccgcaaaatatcgtcgtagctgcactcgatatttttaaaatcctgtatcaagtgctgaaaatcatttcatcgccacttccaattcctttctgcatggtaagtagtgaggacgaaaagaagaatatgataaatattgattcgtggtaatcagagagagtcgcgacatttgtgatgttattcttacaactgtaagaagcgccggtgatttacaagcaagggtatgattacgctttttaaagcgtaccataaaacataacataataaatgatttgtgatgacacgggattattgcggtttactttgaggaatataaaatgcgagtttatagcaccgcgagcgccaaataattttatgaccacaacctgtcgtattgtggtcataaaaaattgtcggctggagggagttaaatcctttacctcaatatactgcctgtcagcattagttcacaaacagtgcttcgctatcgacgatgattccatcttccgcacctttaagcgccaggtttgcctcgtagtattgctttttatcaagcagtttctgcgcatcagcaagtgcattacgagtctgtttaagtggcatcagatattggttttccattacgccaacaccggccaggcgaagctcttccattgcgccctttttatcccctttcgccattttttcattggcaatttttatcgcggcttctttttcgggagttgctacataactctcagaaattccgacagatgcattaatgacaatatattggtcatcattgagattggtctttttacctggcttagcgaactttgcccattcggtactgtcatcactcagcaaagcggaagcttcattggtcagttcttttgccttttctggatcgccatgaaacagagccaggcgcgctacctgcacgtcacgcatcgcatataaaccttgttcagagatacgctctgctgccgctgccgttttctgggtttgctgaacttgctgagtttgctgttgtgccgctaccggagcattatcagcagcccatacagtactagatgccagaattgctgtgaccatcgtggccataattaaacgtttcatacttacctcattctttaacagttttagaaaacgccgccatcatattgggtgagcatgaaatgagaaatcagagagcaacggtcattttgaaagggttatcttacagttgtagttattatcgcaagaagtattttagtcttacaattgtaggaatatgcttcctgtcgcagagaactattcttatataccacaaagagatgtcatttattatatcgatgtaaatactgattaattaaatgtaaatacagccataacatcgtaggttctcagtgaaccattttcaggataactttctatgaaagtaaacttaatacttttcagcttatttttattggtctctattatggcatgcaatgtttttgcattttccattagcggtggtggaagtgagaggagctataaagagactgaaaaaacaagtgcgatgacgaccacacactctacaaaacttcagccaagtcaggcgattttgtttaagatgagagaagatgcgccaccattaaacctcacagaagaaatgccgcccccttttccgacaaaggcgaattatcttattcatcctgtgcgataacgtctttcacatggcaggtgaacaatcatgtctgatgctgatgtgaacacctgcccaaatgagccatcctgacccattaccgcctgccataccccaccataaagcgaatcatcaagccacaagccggggcaagaaacataaatatccccgtcactagttcattaccgccagttaaccacatggtgaagtaataaatgagtgcagcgaggatcaccatgccgaagaaagaagagaccgcgcttaccacgttcagtacctgaccgatgtagccgcttacgcagacaatacacagggcgagaaacatccataaattaatcatagctcaacctcctgccgcgctaaaaaacctgtaacttcagtcactttaatagtaagacaatccttaacctctggcaatttttgctaagcatcaatgaaaacagcatgttaaatgcaagactgttgtgtacggaaaaatatttactttgcacgattaataatcagtagctgaaagcagtcagcgagtgataaagtacagataccgcattcatgctcctcgtggttatgtcctgactagtctttacactctttacaggaaccattgtcgtacatgatggcccaaccaattgagtgtaccgctgtcgacatggaatcttctgcgatacaacaattcgtatctacagaaggtaactatgtttccacaatgcaaattttcccgcgagtttctacatcctcgctactggctcacatggtttgggcttggtgtactctggctttgggtacagcttccttatcctgttctctgctttctcggcacgcgtattggcgcaatggcgcgaccattcctgaaacgtcgtgaatctatcgcccgtaaaaacctggaactttgtttcccgcagcattctgcggaagaacgcgagaagatgattgccgaaaactttcgtagtctcggcatggcgctggtagaaaccggcatggcatggttctggcccgacagtcgcgtacgtaaatggtttgatgttgaagggttggataaccttaaacgcgcacaaatgcaaaatcgcggcgtaatggttgtcggcgtccattttatgagcctggaactgggcggccgcgtgatgggactgtgccaaccaatgatggctacctatcgtccacataataatcagctgatggaatgggtgcagacccgtgggcgcatgcgctctaacaaagcgatgatcggcagaaataatctgcgcggcattgtcggtgcactgaagaaaggtgaagcggtatggtttgctcccgatcaggattatggtcgtaaaggcagctccttcgcgccgttctttgcggtggaaaatgtcgccacaaccaatggcacctatgttctctcccgtctctctggcgcagccatgttgaccgtaacgatggtaagaaaagcggattacagcggatatcgtttgttcatcaccccagagatggaaggctacccgacagatgaaaatcaagccgctgcctatatgaacaagattatcgagaaagagatcatgcgcgcaccggagcagtacctctggatccaccgtcgctttaaaacgcgcccggtgggagaaagcagcttgtacatttaacaaactgctcttactctttccctcctcaaatcggccataataacctcatggtttttatggcttttttcttaaggttttttccttcgctgaatatctaattattaccgtcagaaattaaactgtcgccgatatgagacacttgtaagttactaaaagtaaataagaaaatgcctcttgtctcgtttcagttttaggcgtacattagcgccgtctcgagcagtttagctcagaattctggggtgatgcccacggtaaaatacagggcttttaaggtcgctttgcccggtgtcaactcactgtatcaggtgtaatgaagtcattcaggcgtaacagtaattacgcggagagatgtaaagtgaaatatttctttatgggcatttcttttatggtcatcgtttgggccggtacttttgccctgatgatctaaaagcaaactgtgcaatgaaaaacaggagccatcaggctcctgtttgcatttctgacgacggtgtttattccgcgttttcgtgaatatgtttgctgctggcgggtagtaaaccgtcggcacggaacatcgctttaatccctctgatggcctgacgaatacggtcgcggttttcaatcagtgcaaagcgaacatgcgtatcaccatagtcgccaaagccaatccccgggctgacacaaaccttcgcttcgttaaggagcttcttggcaaattccaggcttcccatggccgcatatggttccgggattttcgcccagacatacatgctagccttcggcatttcaaccatccagcccgcttcatgcagccctttaaccaatacatcacggcggcgtttgtactgttcggcaatgtcgcgcacgcactgttgatcgccctccagcgccgcaatcgccgccacctgcaacggcgtaaaggtgccgtaatcgtgatagcttttaatacgagccagggcgctgaccagcgttttgttgccaaccataaagccgatacgccagcccgccatgttgtagcttttgctcagcgtaaagaactcgactgccacatcgcgtgcacccggtacctgcataatactcggcgctttccagccatcgtagacgatatcggcataggccaggtcatggaccaccagcacatcgtagcgtttcgccagcgccactactttttcgaagaactccagttccacgcattgcgcggttgggttactcgggaagccgaggatcatcatcttcggtttcggataactttcacgaatggctcgctccagttcgttgaagaaatcgacaccttccaccagcggcacactgcgtacctgcgccccggcaatcaccgcgccataaatatggatcgggtaacttggattcggcaccagcaccgtgtcaccatgatccagcgtcgccagcatcagatgcgccaggccctctttgctaccaatagtgacgatggcttcactttccgggtcgatttcaacgtcgtagcgatcctgataccagcgggaaatggcgcgacgtaaccgcggaatgccgcgactagtggagtaaccatgcgtgtccgggcgctgggccacagtacataatttttcgacgatatgcggcggagtcgcaccgtccgggttacccatgctgaaatcgataatatcttcgccgcgccgacgcgcagccattttcagttcagcggtgatgttaaaaacgtagggcgggagacgatcaatgcgcgtaaagcgacgttcagggcgagtgtcagccataatttcctcagattaacgttagcgcccggaccgtccgagcgacgctgccacgatggtggctgttttgaaaatagcctgattaatttctgtctgtccagtgttttagaacattttattaatgacgttaaatgaggaactctgctttaaaaacaggaaatttatctgcgctaacaagaaaattaccactcattttattaacataataatttcaataaatttactaaccagaagtgcattatcaagagatgcattgctaatacaccatttatctatcaatccccttttaaaattgtggtttttcctcaaaaacggcctgctggtcatcagccttcaggttacctatcatagaggtttaatccttattcagagtcacccgtgcacgaaatattcaacatgctgctggcggtcttcgatcgggcagcgttaatgcttatctgcctgttctttctcatccgtatccgcctgtttcgcgaactgttgcacaagagcgcgcactccccaaaagaattgctcgccgttaccgccattttcagcctgttcgccctgttcagcacctggtccggcgttcccgtagaaggcagcctggtgaacgtacgtattatcgcggtgatgtccggcgggattctgtttggcccgtgggtaggcatcattaccggcgtgattgcgggtattcaccggtatttaattgatatcggcggcgtgacggcgatcccctgctttatcaccagcattctggcgggttgtataagcggctggatcaacctgaaaatccccaaagcacagcgctggcgcgtcggtattctcggcggcatgttgtgtgagacgttgaccatgattctggtaattgtctgggcaccaactaccgcgttggggatcgatatcgtctctaaaatcggcattccaatgatcctcggtagcgtctgtatcggctttattgtgcttctggtgcaaagcgttgagggcgaaaaagaggccagcgccgcgcggcaggccaagctggcgctggatatcgccaacaaaacgctaccgctgtttcgccatgtcaatagcgagagtttacgcaaggtctgcgaaattatccgcgatgacattcacgccgatgcggtggcgattactaataccgatcatgtgctggcctatgttggcgtgggtgaacataactatcagaatggcgatgacttcattagcccgactacccgtcaggcgatgaattacggaaaaatcatcattaaaaacaatgatgaagcccaccgcacaccagagattcattccatgctggtgatcccattgtgggagaaaggggtcgtgaccggaacgctgaaaatttactactgccacgcgcatcagatcaccagcagtttacaggaaatggcggtcggtctgagccaaatcatctccacgcaactggaggttagtcgcgccgagcagctacgtgaaatggcaaataaggcagagcttcgcgccctgcaaagcaaaattaatccccattttctgtttaacgctctgaacgctattagtagcagtatccgtctgaatccggataccgctcgccagttgatctttaatctgagccgttatctgcgctataacattgaattaaaagacgatgagcaaatcgatatcaaaaaagagctgtatcaaattaaagactatattgccattgagcaggcccgctttggtgacaagctgacggttatctatgatattgatgaagaggtgaattgctgcattcccagcctgctgatccagccgttggtggagaacgccattgtccacggtattcagccttgcaaaggtaaaggcgttgtcaccatcagcgttgcagagtgcggaaatcgggtacgcattgcggtgcgagataccgggcacggcatcgatccaaaggtgattgagcgggtcgaagcgaatgaaatgccgggcaataaaattggcctgctgaatgtccatcatcgcgtgaagttattgtatggcgaggggctgcatatccgccgcctggagccggggacggaaattgcgttttacattcctaaccaacgcaccccagtcgccagtcaggctacgttattgctttgagccggagtgatattgtgaaagtcatcattgttgaagacgaattcctggcacaacaggaactgagctggctaattaaagagcacagccagatggagattgtcggcacctttgacgacggtctggacgtgttgaagtttttgcagcataaccgcgtcgacgccatttttctggatatcaatattccgagcctggatggcgtgttgctggcgcaaaacatcagccagttcgcccataaaccgtttattgtgttcatcaccgcgtggaaagaacatgcggtagaagcgtttgaactggaggcgtttgactacattctcaaaccgtatcaggagagtcgtattaccgggatgctgcaaaaactggaagcggcctggcaacaacagcagaccagcagtacgcctgccgcgacggtaacgcgtgagaatgacaccattaatctggtgaaagatgagcgaataatcgtcacgccaattaacgatatctattacgccgaagcgcacgagaaaatgacctttgtctatacgcggcgtgaatcctacgtaatgccgatgaacattaccgaattttgcagcaaactgccgccgagccattttttccgctgccatcgcagtttttgtgtcaatctgaacaaaatacgcgaaatcgaaccgtggtttaataacacctacattctgcgactgaaagatctggattttgaagtgccggtcagccgcagcaaagtgaaagaatttcgccagttaatgcatctttaatcgggaactttcatgaaagcaccaggcttgcccgccgatcaacaatttttcgccgatctgttcagcggcctggtgcttaacccgcaactactggggcgcgtctggtttgccagccagcctgccagcttgccggtgggcagtttatgtattgattttccccgtctggatatcgtgctgcgcggcgaatacggcaatctgctggaagcaaagcagcaacgtttggtggaaggagaaatgctgtttattccggcgcgcgcggctaatttaccggtcaacaacaaaccggtgatgctgttaagcctggtgttcgctccgacctggcttgggttaagcttttacgatagccgcaccacgagcttgttgcatcctgctcgccagatccagcttcccagcctgcaacgcggtgaaggtgaagcgatgcttaccgccctcacccatcttagccgtagcccgctggagcaaaatatcattcagccgctggtgttaagtttgctgcatctttgccgtagcgtggtgaatatgccgccgggcaatagccagccgcgcggcgattttctctatcacagcatttgtaactgggttcaggataattatgcccagccgctcacccgcgagagcgtggcgcagttttttaatatcacgcccaatcatctgagtaaactgtttgctcagcatggaacgatgcgttttatcgagtatgtgcgttgggtgcgaatggcgaaggcgaggatgattttgcagaaatatcatctgagtattcatgaagtggcacagcgttgcggttttccggatagcgactatttttgtcgcgttttccggcgtcagtttggtctgacgccgggagagtacagcgcccgttttcagggctaacgtcagaaggttaattctgtttccagcagcgtcaggatactttgtgcatcttgcgcggcaaacaagctctggcggaagtttttattcaccagtttacgcgccagctggctgaagactttcacatgattcatcccttcgttagcacccagcgtcagcatgatcaccagttcgacttcgcccatttcactctgccagccaatcggtttcgccagccgggcaatgctgatactggaatgacggatccactgagatttggtgtgcgggatcgctacgccaaaaccaacgccggtggtaacaatctcttcccgctgccagacatcttcttccagctcaaacggatgttcagtgcgcccgttaacgccgaggttgccgcacaggaactggatcgcctgctctttattgctaaaatcctgatcaacaaagatattctccagcgccagcagtgggcgaacgtcttcttccggcgtaaaggcggtgagtaacgcttcaatttcctgcgcactgcggcattcacatgcctgacgcgccagttcccgacacgcctcgctatccagttgacgaagctggcttttcaccgccggaatacgcgggctactcatactcagctcatccaggcccagcccaagcagtagcggcagataacggctttcaccgcccagttcaccgcaaatgcctacccatttgccccgctgatgcgcagtggtaactatttgctgcaacatgcgcaggaagcttggcgtaatcgggttatatagcgggcttacgcgcgggttattacgatcgaccgcatacagatactgggtcatatcgttggagccgatactgaagaaatcgacctcatcgcagaagtggtcgatgatgtagcacacgctcggaacttccaccatgatcccaagcgtaatcgtctctgcatgacgcaggccatcgcgcttaagctcaacgatcgctttttggatctcgcctttcacccataagatctgatcgaggctgtgaaccatcgggatcatcaactgggcgttgccgaaactggcggcgcgcaaaatggcccgcagttgagtgcggaacaggccagcaaattccgggtaaatacgtaccgcgcgatagccgaggaacgggttctcttcctggggaatattcagataaggaatgcttttatcgccgccgatgtccatcgtgcggaagataatcggcttgtcgcccgccgccagtagcacctgctggtaggcttcaaattgctcctgctcgtccggcgcgctgtcgcgatccatatagagcatttcggtacggaacagcccgacaccttccgcgccgttggcaaacgcgcctggcgcttccagagcggtgccgatattcgccgcaatatcaatacgcttgttatcacgggaataggccagctgcgcggcagcctgcgcctgttgtttttggcgtttatccgccagcgtctgcgcgacctgataataaccgctcaccgcgtcattcgggttaatcgccagcacgccgcactgggcgtcaagcactgcaggttgcccggcataacgggcaatcgcatccagcggcaagccactcagtaccgggatcgcgctggcacgggccagaatcagtgtatggctggtgcgcccggttttctccagaatcatgcccgcaagatttttcaaatcaaggctcaaaaactggcttggggttaaatcttcagccaccagaatggtcggtttttcaagcaccagcttgttgcgcggcttcagttccggccaggtgatatgcagcaactgttcgctgatatcgcgaatgtcgctaacacgttcgcgcagataatcgctggcagaggcagaaagtttggcgcaaacctgctccatattgctgatgatcgccgcccccagcccctgatgctgttctgtcatcaggcgacggatattgcctgcaaattcatcatcctgaatcaggctcaaatgggcgctgaggatagttttgctttcgccgtcacgctcacgcaattgctggttcagttgctcggcaagcgttgccaggctgtgctccagccgggtggaatcttgcgcactggcggggattgcccgataactgtcgaggctgtcgctttgtaacagggtcagcgtacccacgccgacgccgcttgccagcacattgccgtacagtaaatccgggttaaggcggcttaaactacgcggcagcggatgcgccgtcagttctgcctgcgtaggctgaacgctgtcgctgtcgataaagcgcacctggatgtactcttccagcacgcgccgcgcctgctcttcatcgctgccgctaatgttcaggctgcaactgtcattaaatagggtgccggtgccaatcagcgccaggctgcttttcgcatctgcctttgcgttctggcgatggttaataaaagtgatttcgctttgccactggctgcactgttctttaagttcccacgccggacgagcatgtagaccgttaggcaaaggacagagaaattgaatcgttaacataaccgctccgggttaatcaggagatcatctgaaatccgtcagttgaacaaccgtctcacgcgtaagacgttgaataagggcagataaaagttgctgcatctgcaaaatgtcgcggcaatcggcaatgcttgcggcgcaatgtccatggcgggttgctggccccatcaccactgtgggcacgccggtgccggttaagtgcaccgccccgccgtccgtgccgccgttgctgaacatatctgcctgcaacggcacgccaatttctgccgccacggtttcgacccaggcggtaagttttggcggcgcaatcaggctcttgtcgcttaacaccagcatcggcccgttaccaatctggcgatggttagccgcgccataatcaaagtttttcgcccagcaggcggtatcaagcacaatggcgacgtccgggctcaccgcgcgggtggcagtttgcccgccgcgtaatcccacctcttcgctggaacttgccaccagccacacttccgcaggtagttcggcgtcgtgcagttcgcgcagtaacgtcaccagcagatagcaaccgaggcggtcatcaaaggctttccccatcactcgctggtgagggagaacctgaaaagtggtatcaaacgtgacgcgatcgccgggacgaattcccgcctgcatcacttcgtcataggagcgcgcaccaatgtccacgcgcatggcgctgacgtcattcccctgccggtcgccgtcaagcaggcctggaattttgcactcttcacgggtggtgatgcgcaccggctgcagctggcgggcagccatgcgtacgttgccaaccggcagcacatcaatcgccccttcgcgggagatgctgcgcaccataaatcccacttcgtccatatgcgcacagatcatcaccttcggacctgtgctttcattcaggcggatcagcacgcttcccagaccatcaaatcgcacttctttttgcaggcgatccgcttcttccagcaggatctgccgcacttcctgttcgctggaggcgatcgcatctgcctcgctcaacgcttttaataggcttaaatccattatgcctctcccgtgagcaacactgttttcggcatggcgtagagcacttctgcgccttgcggggtaaccagcacaacatcttcgatgcgcacgcccccttgccctggcaaataaatccccggctccacggtcagtaacatgcctggctgtagcgtcgtggtgtcccgcggactaaaacgcggatcttcatgaacttcaatgccgatagcgtgaccggtgttatgaccgaaatagtcgccataacctgcttctgtaatgacccggcgcgcggcatcgtcaacctgctggcagcgcacgccggggcgaatcgcggagattgctgcgagctgtgcctgcaggacaatttgatagacgttaaacagcaggtgagattcggcgctcaccccttcgccattcaccagcaaggtgcgcgtcatatcagagcagtagccctgatacagcgcaccgaaatcgagagtgacaaactcgcccgctgcaacaatcttgtcgctggctttgccgtgcggcagcgccccacgccagccactggcgacaatggtgtcaaaagaggctttttctgcgccctgctggcgcataaaccactccagttcagcggctatctcgcgctcgctcatccccgcctgaataaagcggcgaatatgctctgcaccgcgatcagcaatcccacaggcgaggcggattttctccacctcctctggcgttttgatttgccgcagcacatccggcgtggcgctaaccagtttcgcattgagttcagactgccagcggtgcgcggtttcccaactcacctgctggccctcaaaaccgagcgtttgcaactgttcatcggcaatgatttgattgacgatagtggtaagcgtgttcgtcgcgtcaagcaaatgcagctggtagccttgcgcacgggcttccacctcaacgtaatagcggctatccaccagaatgtgcgcactttcacggctaatcaccacataaccacttccggtggagatccccagatgcggctgtttgttctgccgactggagagaagcactgcatccagttgttgcgccttaagccagtcgcgcaggctagcgagtaatgtcatctggattttccttcttacaggctatcgattaacaatttgcctttacggaacatcatcagacgcaggaacaccaccatcagcgcagttatgactgcccccagcgcgatccccgccatatagacgcccaggttagtgaccagcggccatgcccagatagcggactccgggaaccattgcactgcgcccagccagacagcggcggtactgccgacaatagcgccgaccatatagctcggaatggcggtgatggggctttccagcgcaaacggaatcgcaccctcactgatccccataaacgccaggaacatggcggtcttaccctgcggataaagttgagcgttgaacaggcgtttgccggttaaacgacggtcgataatggtcgccagccccagaccaatcggcggaataacgatagcgatagaacgagcggtgaccggtaatacgtggtcagtggtaaagctgaaggcaacaaaacctgcggctttgttgatcgggccaccaaggtcgattgctgtcgccgcggcgatccccattgcgtacatcagcgcgcccttctcacctgcggcagtcagcacagtacggataccgccgttgatccagccaccaaagggggtgatgacgtagtacatcgccagcatgacaaaaatggcggaaagaatcgggagcaaaaatgtggttttgaacgctaacaggaaatccggtaactggattttctggttcatccacttcacaaggtaaccggcaacgatagaaataatcagcgcaccaatgaaggtggacggcaccgggctagaggtcgcccattgcatagtgctgggatcgaagttcagcagttgcgtcggctgggtagacatcaacccgccgataaaaccagccgggaacgccagtttgccaccgatagagttcgccacaaaagcagcaaacatcggaatggcaaaaccaaacaacacgccgccgaaggactggctcagccaggcaaatttaagtaaggagaggtcgaaaccggagaatttcccgctattaagagcatccatgatgccgatctcagcaggaattttaagccagctataagcaatcagctggctgaaagcgaggatcacaccgcccataattaaggtcggcaccatgcgactaatcccactcatcacatgctgcgggagttcaccccagaagctggttttagaggcctgcggattcttaactgccgctgccgcaccggatgcgccaggcacaacggttgcactgcgttttttaatggccataacaattatccctgtcgaatattactgttgttcagaggcaatcatctcttcgatttctttgatgatgcccgcagcgtttttaattgcgtcctgcaaagtgatttcataaacgtcgcgactttcgaaacgttcgttatcttccggggtaactgccacggagtggatgatgatggtcgcttcggcgatatcctgcgccgtcaggcgattctggataccgtccgcgccctgggtttcaattttcacttcataaccggcttctaccgccgcttcttccagcgcctgagcggccataaaggtgtgagccaggcccatcgggcaggcacataaggcaatcagtttcttactcatcgttaattcctcgttcagtgatagttgacgagtgaaattatgaacgtgcaaaacaaatcgccgttaccagacaaataatgcatttactggagaattaatcccgctgtacggaagtgtgacgcaggtcgaccttgtgaggggacacaaagaaaaattgaataaactgtatgatttaaaagattatcgggagagttacctcccgatataaaaggaaggatttacagaatgtgacctaaggtctggcgtaaatgtgcaccggaaccgagaaggcccggattgtcatggacgatgagatacaccggaatatcatggacatattctttaaagcgccctttatcttcaaatgcggcacggaaaccggaggctttgaagaactcaaggaagcgcggcacgataccgcccgcaataaacacgccgccaaatgtcccgagattgagcgccagattgccgccaaaacggcccataatgacgcaaaacaggctcaatgcgcggcggcaatcggtgcagctgtcagccagcgcgcgttcggtaatatcttttggcttgagattttctggcaggcggttgtcagctttcacaattgcgcgatacaaattcaccagcccagggccagaaagcacgcgctccgcgctaacatgaccaatttccgcacgcaatatttcgaggataatggcctcttcttcactattcggcgcaaaatcaacgtgaccgccttcgcctggcaagcttacccaacgcttatcgacatggaccagatgcgcaaccccaagccccgttccggcaccgtaaaccgcaataggcttaccttcgaccggttctgcgccaccaaactgaatcagatgctcttttttcagcatcgggatcgccatgcttacagcggtaaaatcgttaataatttccagatggctaaaaccgagattctttttcatttcggcaatactgaacgcccaggtatggttggtcatcgccacccagtcaccggtaattgggcaagcgatggcaatacagccgtctttcacctcgaccttatgttcttcaagataaacgcgaatgaccgcttcgaggctggggtaatcaagcccactataggtcttagcctggctgatttcaccactggcaatatcacacagagcaagacgtgcgttggtgccgcccacatcaccgactaatgcatactttgtcattcttcaactgctccgctaaagtcaaaataattctttctcacactgtaaatacctgggggcataacaacaacgccggaaaggcaggctccctgtaaatatcgatctgggtcacacaattactttatcgtttcagcaccaattgcagcgatgcctttttgcaagctgggcaaactaagtatctgaccccgcataaggaatagaacacaggcggcactaacccggacgtagactgtattacaaaagcggcaaaaagcagagacaaaaaacccccgctttgcagcgagggttggaaatttggtggagctaagcgggatcgaaccgctgacctcttgcatgccatgcaagcgctctcccagctgagctatagccccacgatgcgtttacgtaccaagtttgctgggtgcaaaatttggtggagctaagcgggatcgaaccgctgacctcttgcatgccatgcaagcgctctcccagctgagctatagccccgtcacgtaaagcttgtcgagttgacgggcggcatcatatgaattccgcccgaatgtgtcaacggcaaattgcaacgtgtagtttcaatcgctgaaaaatcaggcaaatgaacaattttggaaaaccgctcgcattcagtagttattcatgtcacggtttcctgtaaagtggtgttataaaatgaactactaatagacccacatacattcagggaattgttatgttcaaggagaggatgacaccagatgaacttgccagactgaccggctatagccgccagaccattaataaatgggtacgcaaggaaggctggacaacgagtccaaaacctggcgtccagggtggcaaagcccgactggttcacgtcaatgaacaggttcgtgaatatattcgcaatgctgaacgtccagaaggtcagggagaagcgcctgccctttctggtgatgcgccgcttgaagtattgctggtgacactggcgaaagagatgacgccagttgaacaaaaacagtttacatccttgcttctgcgggaagggattatcggattgttacaacgcttagggattcgcgatagcaaataatatgaaaagattacgcaataaaatgaccaccgaagaactggctgaatgcctcggtgtggctaaacaaactgttaaccgttggatcagagaaaaaggctggaaaacggaaaaatttcccggcgtgaaaggcggtcgtgccagacttattctggtcgatacgcaagtttgcgagtttattcagaacacgccagccttccataacacaccaatgttgatggaagctgaagagagaattgctgaatacgctcctggagcacgcgccccggcgtatcgacaaatcatcaacgcgatagataatatgacagacattgagcaggaaaaagtcgcgcaatttttgagtcgtgaaggaattcgcaatttcctcgcccgtctcgatattgacgaaagtgcataaataaaaaacggcaggatattatctcctgccgtttatctttttacacgctaattactgctgattttcgcgttcagcaataaaatccagcgctttgttgatacgctcgatactgcgggtcttaccaattgcgtgaacggtaacatccagtgctggagactgccccgcaccggttacggcgacacgcagcggcataccaactttacccatacccacttccagctcatccgccgtcgcctgaatagcgtgatgaacgttttcagcggtccagtcagtaatcgcggccagtttgtcacgaaccacttccagcggctgacgcgctaccggacgcagatgttttttcgcggcgtcggcatcgaactcagcaaaatcttcgtagaaataacggcagctctgtgccatctctttcagcgtcttgcagcgttcgcccagcagtttcaccagatcagccagctgcgggccgttacgggtatcgatattttcctgctcaatgtgccactgtaagtgagtagcaacatactccggcggcagcgcgttaatgtagtgatggttcagccacagcagcttgtcggtgttgaacgcactggcagatttgctgacggcattcaaagtgaagtatttgatcatctcttcacgagtgaagatttcctgatcgccgtgggaccagcccagacgcaccagatagttcagcagtgcttctggcaaataaccgtcatcacgatactgcattacgctgactgccccgtgacgtttggacagttttttaccgtcatcgccattgatcatagaaacgtgcgcgtaaaccggcaccggcgctttcagggccttaagaatgttgatctggcgtggcgtgttgttgatatggtcttcgccacggataacgtgggtgatttccatatcccagtcatcgacaaccacacagaagttataggttggggaaccatcggtacggcggataataagatcgtccagttcctggttgctgaactcgatcggaccacggatctgatcgtcaaaaacaacagaaccttcctgcgggttagcaaaacgtacaacacacggttcatcatcagcatgatgctcatggctgtggcggcagcgaccgtcataacgcggcttctcacctttcgccatttgctcttcgcgcagcgcttccaggcgctctttagagcaatagcatttataagcagtgccctcttccagcatctgatcgatcaccgcgttgtagcgatcaaaacgtttggtctggtagtacggaccttcatcccactccaggctcagccagttcatgccatccataatggcttcgatagcttccggcgtggaacgctcaagatcggtgtcttcaatacgcagcacgaactcaccgccgtggttacgtgcaaaaagccaggagtaaagagcagtacgcgcgccgccaacgtgcagatagcctgttgggcttggcgcgaagcgagttttgattttcatgaaatggccttacgtttagaaagatgccgacaaccggcaaatcctggaaaaattaagtgggcgatattctatcactcccgcctgattcctcaatgtagttcgggtttctaccttacgcattattgttttcgttgacaaattgcgcaacacggtctgttttgcgatcatcttgcttaaatttacgacgaacgaacaatttctttagaaaatgcgttgactcattttgaactctccctataatgcgactccacacagcgggggtgattagctcagctgggagagcacctcccttacaaggagggggtcggcggttcgatcccgtcatcacccaccaactactttatgtagtctccgccgtgtagcaagaaattgagaagtgggtgattagctcagctgggagagcacctcccttacaaggagggggtcggcggttcgatcccgtcatcacccaccactttctcgccagctaaatttcttgtaaaaatgtgaagtaccgaagtgggtgattagctcagctgggagagcacctcccttacaaggagggggtcggcggttcgatcccgtcatcacccaccacttcgggtcgttagctcagttggtagagcagttgacttttaatcaattggtcgcaggttcgaatcctgcacgacccaccaatgtaaaaaagcgccctaaaggcgcttttttactatctgcgatactcaaagattcgaacctgcagcaggtttgagttgagcgcagcgaaacaacggagccgctcgtgctggcgacggcccgaagggcgagcgaagcgagtcatcctgcacgacccaccaatgtaaaaaagcgccctaaaggcgcttttttgctatctgcgatttgcgaaattgcctgatgcgcttcacttagcagactactatttccggcaattcctgtctcctcacttactgtgtcaatgcagccaacagcttaaccatcgcgggcgtcacctgctgtgtttcataaacaatatataaatctgcagggatgcgctgtttgagcggacggaaaatgacacctggccagttcatttgtgcgtagctgtccgctatcaatgtgataccaatgcccatactgaccatagcgagtaccgtttgcggttcattaacttcgcgaataacaaccggactaaatcccacctgctggcaaactcgctgcaaaaaatcccagtcagtgtaaacgggcggcattgtaacaaaatactcgtcacgtagcgcttccagcgggacggtggaaaaactactgagatgatgctcttcaggcatcgccaccagaaacgcgctttcatgcaaccgtaagctggtaaaaccagtcggtggttctgtcgccattcgccagatcccggcatcaagttcgcggcgttccagcaaggccatttgcatcgcgggcatcttttcgcgaaaaagaacgtcaacgttaggattttccctgaggaatcgccgcataaccgggcgcatccgtccccacattgccgttcccactacgccgagttcaatccgccctgcttctccccgacctatttgttcaatccgagccaatacattattagcattcaccagcaatcgacggctttcttccatcaagattttgcccgcgtgtgtcagtacgacgctgcggctatggcgaataaaaagctgcgtgccgagttgattttccagctctttaatatgaatgctgagcggaggctgagacatatttaaacgcgctgctgcgcggccaaaatgcaactcttccgctacggcaagaaaataacggagcaacttaagatctgttctgtatacgcgttccataattaagtgctccatataataaatacatcgtattaaattatcatggcataaagtatttcaccaccagatatccgacatacataaacacaatggataatatacccggtaatacatttggtacaggaataggcaagcgcacgattgtaaacaaagcaccaataccaaaaccaacgccggaagaaaataaaatatctttcactaattaacctttatcataaaagcagctctgaagagcagagccgcgaatccttttaatgagtcaccgctcgatgctttatcttttcagggtcatgattatatttaaacccaaagaaaaatatcactgcgagaaaaagagcatatcctgcaaacaccagccagatagtttgccagtcttttacgccatccacgctaaagtaatctactgccatgccactcagaatgctgccaacccatgcgccgacaccatttaccatggtcataaagagcccctgcgcgctggcacgaatgctggaatcaacttcctgttcgacaaatacgctaccagaaatattgaagaaatcgaatgcacagccataaacaatcatgctcagcagcagcaaaataaatccggttgtactcggatcgccataggcgaagaagccaaagcgcagcgtccaggccaccatactcatcagcatgacggttttaatgccaaatcgctttaaaaagaatgggatagtcagtataaagcccacttctgccatctgactaacactcagtaaaatggagggatatttcaccacaaaactgtcagcaaactccgggttacgggcgaaatcatgtaggaacggattaccaaaaacgttggtaatttgcagtaccgcacccagcatcatggcaaagaggaaaaagatggccatgcgtggatttttaaacagcacgaaggcatccagacccagcttgctggcaaggcttgtggtcgcttttttctccgcaaccggaatcttcggcaaagtcagcgcataagcgctcagcagcaaactcgcaccggacgcgatatacagctgcagactactcaattccagatgcagcaggcttactgcccacatcgcgacaatgaaccccaccgtaccaaaaacgcgaatgggcgggaaagcggtcaccgggtcaagccctgcctgggcaagacaggaataagagacgctgttgcttaacgcaatagtcggcataaacgccatcgcattgactaacatcacccaaaacatcatatccggatcagttacggatgccgcataaaaaagtacgcccgcacacaccaggtgacacagcatgtatgcacgttctgcgcgcagccatttgtctgcgatgatccccattataccaggcataataatcgcggcgatccctttggaactgtaaaccatgccaacattagcgccggtgaaatgaagagtattaatcatgtaagagccgagggtaaccagccagctcccccagataaaatattgcaaaaaggacattacctttaagcgcatcgcgatgctcataatcgtttccttgtcgcatcatttggcctcacccgcgaggccgtttcttattgtttttctcaggcaattttgcgcagaaagccacaaataaggttgatgaagttctgcttagagagctccgcagccgccagcgtttgcgcatgactcaatttcacatcgcttaaaccttccgccatattggtaatcgcagagaccgcaacgactttaaggtcgcaatggcgagcactaataacctcaggcaccacagacataccaacaacatccccaccaataatttgcatcatgcgaatttccgccgcagtctcgaaattcggccccggatagctgacgaacacgccctccgtcagagggaaaccctcttctttcgccactttttgtaacagtgcgcggtattccgcatcgtaggcatttgccagactgaagaagcgctctccaaaacgatcatcgttaagacccaccatcggcgtaccgggcatggtgttgatatgatctttcaatgcgaccaggctgcctgcccccacttccggacgcaggctgcctgccgcattggtgcagaacagtagctcgcagcccagcagcttaaaggtacgaattgcgtcagtcataatggtcattccacgaccttcgtagaaatgtccgcgacctttcatacataccaccggtacgccctggagatggcccagcactaactcccccgcatgaccatgtaccgtacttaccgggaagcccggcagcttttcgtaggaaattgcgacagcgttctcaatctgatcggccagcgcgccgagcccggaacctaaaataaaggccactcgtggcgtgaaatcaggtttataagtcttgataatatctatgcaaaacagcgggttatgagaaaattgaacctgagacatacatatcctttttctgtagggtggaatctaacgcctttttatagcgaggttgtcccggctcttaccaatacacttttctcacgcattcaatagcgattcgatatcgatggatttatatcttttctctattaatccacggtaaaaactgtattggcgatattaattcctttgcattaacaatatgtcgtttttagcaaaccactttattaagcaatctactaataacgatcggcatagggaattatgctatgaaaaaacatcttttaactctgacactttcctctatattagcgatacctgttgtatctcatgcagaatttaaaggcggttttgcagatatcggcgtgcattatctggactggaccagccggactaccgaaaaaagcagcaccaaaagtcacaaagatgattttggttatcttgaatttgaaggtggcgctaactttagttggggagaaatgtacgggttcttcgactgggaaaacttctataacggtcgccataataaaccaggtagcgagcagcgttatacctttaaaaataccaaccgtatttacctgggtgacaccggatttaatctctacttgcatgcgtatggcacctacggttctgcgaatcgcgtgaatttccacgacgatatgttcctgtacggtatcggctacaatttcaccggcagcggttggtggttcaaaccgttctttgctaagcgttatacagatcaaacctattacactggcgacaacggctatgtcgccggctgggttgcaggttacaactttatgctgggcagcgagaaattcactcttaccaactggaacgagtacgagtttgaccgtgacgctacctatgcagcgggtaatggcggtaaagaagggctgaatggcgcagttgcactgtggtggaatgcaacaagtcacattactacggggattcagtatcgatatgcggatgacaaactgggcgaagatttttaccaggatgcgataatctactccatcaaatttaacttctgattgattactgccggggctcccggcagtatgaattcactttatatctgatacaacggatccccttcccgcccagccattagcgcattgccctggtctcgtaccacgtcccataaagcttcagcggcggtggaaagactacggttcttcctgcgcaccagcatcaactggcgttcaacaaccggcgtaatgcgctttaccaccagtgggctaccttcaggcaatggtagcgccagtgcgggaagaatactgatgccgatgcctgcggctaccatcgggaacagcgtcgccggatgtccaatctcctgcacaatattcgcctgaataccattgcgcgccagcgctgcgtcaatcagcggtcggctgccactcgcgtaatcctgcaacaccaatttcgctccctgtaatgcctgccagggtacataatcttccacggccaaagcgctatcgcgatggcaaagcagaaagaaaggctcggaaagaatcgcttcacattgcagatcgcccactgggcctggatcgatgacgatgccaaaatcgacatctccctggcgaatactttccattacccactgctgcggacgatcgtgcaggacaaactgaatatctggatagcggcgatggctttcagcaatgcattgcggaataagatgcgcggaaatggtctggctggcagcgacccgaacttttccgctcagttgttgccccatacgcccggtatcgcgcaacgtgctgttcagttcatccagcagtcgctcaagacgcaaagccagctgctgccctgcatctgtaagcaccacttcacgcgtggttctgtccagcaggcgaacaccagtatgattttccagttccttcacactgtgactcactgcgctctggctcaggccgatacgctctcctgcacgactaaaacttttctcctgcgctactgtgacgaaaacctttaattgttttaaagaataattcatctgttttcttcatgaatggatgcaataaatcaattttatttctcaaactggaagaagcacaatagaaccatcgatcatctggagtctttatgaaactttttcgtatcctcgatcctttcaccttaaccctgatcacggtggtgttgctggcctctttctttccggccagaggcgatttcgtccccttctttgaaaatctgaccaccgcagctattgccctgctgttctttatgcacggcgcgaagttgagccgtgaggcgattattgctggcggtggtcactggcgactgcatttgtgggtaatgtgcagcaccttcgtgctgtttccgattctgggtgtactgtttgcctggtggaaaccggtaaatgtcgacccgatgctctactccggttttctctacttgtgcattctcccggctaccgtgcagtctgcaatcgccttcacgagtatggcgggcggtaacgtcgcggcagcggtttgttctgcgagcgcatccagcctgctggggattttccttagtccattgctggttggtctggtgatgaatgttcacggtgcagggggcagccttgagcaggtcggtaaaattatgctgcaactgctgctgccgtttgtgttggggcatctttcccggccgtggattggtgactgggtgagccgcaataaaaaatggattgcgaaaactgaccagacgtccattctgttggtggtttatacagcgttcagcgaagccgtcgttaatggtatctggcataaagttggctggggaagtttgctgtttatcgtggtggtcagctgcgttcttctggctatcgtgattgtagttaacgtctttatggcacgccgactgagcttcaataaggcagatgaaattactatcgtcttttgtggtagcaaaaagagtctggcaaatggcatcccgatggcaaacattctgttccccacaagcgtgatcggtatgatggtgctgcccctgatgattttccatcagatccaattgatggtctgtgcggtgctggcgcgtcgatacaaacgccagaccgaacagttacaggcgcagcaggaaagcagcgccgataaagcttaaagcggacgcttcaggggctggaccagttgcgtcagcccctcggttttaatcagcagcgtgatttgcattagctcaccgagcttccctgccgggaactcatctttgcgggcaaaccacagcagatactcctccggcaggtcgattaagcgacgccctttgtatttgccaaacggcattatcgtattggctatttcaatcagctgctctttttccatctcagctacccagcaaacgcagcatttccgcttcgtcgatgacttcaatgcccagttcctgcgccttcgccagtttagatcctgcagcttcacccgctatcaccagatcggttttcttgctcacgctgcccgcgactttcgcgcccagttcgaccagtcgagctttagcgtcatcacggctcatctggcttaagctgcccgtaagcaccacggttttaccagcaaacgggctgtcaatctcttccgcgttgataacgatcggcgcaggccagtgaacaccttccgccaacagctcgctgatgacattgcggttgctttcttcggcaaagaagttgtgaacgtgggatgcaacgacaatgccaacatcaggcaccttttgcagctcttcaatgctagcggcttccagcgcttccagcgtgccgaaatatgccgccagacctgctgcggtggcctcgccgacttcacggatgccaagtgcatagaggaagcgagcaaaggtggtttctttcgctttttccagcgcgttaaccacgttttgtgcgctttttggccccatacgctccagtccggtcagtttgcctgcggtgagtttgaacagatctgccggagtatggacatattctttttcaaccagctgatcgatgattttgtcgcccattccgtcaacatccatcgcacggcgggaaacaaagtgtttcaggctctctttacgctgcgcaccgcaaatcaggccaccggtacagcgggcaaccgcttcaccttccacacgctcaacgtcagaaccacataccggacaatgcgtcgggaatacaacctcacgggtatcttccgggcgttcagaaagcacgacgttaaccacctgcgggatcacgtcgccagcgcggcgaatcaccactttatcgccaatgcgtaaaccaagacgttcgatttcatccgcattgtgtaaggttgcgttactcaccagcacgcctgcaacatggacaggttccagacgcgcaacaggcgtaatcgcgccagtacgcccaacctgaaactcgacgtcacgcacaaaggtcatctgctcctgcgccgggaatttaaacgctaccgcccagcgcggggcacgcgcgacaaagccaagctgctcctgctgtgccagactgttgaccttaatcaccacgccgtcgatatcaaagcccagcgtcgggcggtcttcttccactttgtgatagaacgccagcacttcttccgcgctttcacaaagcgttacccgatcgctgaccggcaacccccactttttaaattgcagtaaacggccaagatgagtatccggcagctcgccaccttccagaacaccaacgccatagcagaaaaaagtgagcggtcgcttcgctgtaatacgcggatcaagctgacgcagactaccagctgccgcattacgtgggttagcaaacactttcccgcccgtgcgtcgcgcatcttcgttaatcttttcgaaccccgcctgcggcaggaacacttcaccacgcacttccagacgcgccgggatattctctccgtgcagcttcagcggaatggcgcgaatagtacgcacattagacgtgatatcttccccggtggtgccatcgccacgggtcgcggcactgactaaaacgccattttcatacagaatactgacggcaagaccatccagcttcagctcacagcaccaggtgactttctcgttgtttttcagacggtcctgcacacgtttgttgaaagcaagaaagctttcttcatcaaaaacgttatccagactcagcattggtacttcatggcgtatctggctgaaagccgccagcggcgcagcgcctacacgttgagtagggctatcaggcgtaatcagttctggatgtttggtttccagctcgcgcagttcgcgcatcagcctgtcgtattcagcgtcgggaatttccggcgcatccatcacatgataaagatattcatgatggcgaagcgtcgttcgcagttctgtcagttgttgttcgatactttccatatcgcaccatcaatgctaaaaacccccgacaagcgggggttcgaagaggagttaatttgccttaagtgtatcaggcgttggcgtctttgacttcgcggatgatgtcctggtactcgcgcaatttctgcggagtcatcatacggcgctgatcgtcaagcacgacaccgcccacttcatcggcaatatgctgcgcagattgcagcatcagcttgaagttctgcagctcgtcaccgtaagacggtacctgcataaagatagtgacacccggagtagtgaaatccttcatttcaggatcaaaggttcccggtttcaccatattcgccaggctgaataacgccgggccgctgccatccgggctaagatgacgatggtaaatattcatatcgccaaaaatgaagcccgcttgttgaatgctgttaagaagcagttcaccgtttagctcgctaccgtgatgcgccgcgacgttcatgataatcaccgcttctttgcgcttcggtttatccataactggagcaggttccgctacaggctcaggctgtggtgccgctacgggttctgcaggctggaaagcctgttgtgccggttgcggtgcactatgcacaggctgcggcgctggcgcgacctgtgggctaactggctgctgcaacggctgttcaggctgcggctgataggcaggctgctgcaccggctgcgctggatgcggagcatgttgcggcggtacctgcgcttcaggcggctgctggaccggttgacgcggctgcgcagacgcataaggcggttggtactggtgttgcgggctcggacgagcagcctcatgctcctgagcgttagccggggcatgattcacgcggtgaacacgaacctcaccaacgccctcatcatcttcgacatcctcgtcataagaatcgtcgtcacgtttactcttcattcgttttaatggccgatcgcggaacatagaagatcgttctttacggctggtccagaaaccatgtaccagtaaagcgattatggcgatcgcgccaacaatgattaatatcagacgcaaatcctgcatcattatattctctgttgttctaacaccttgccaccacggcaaacatttactcactaagagtatttgccgattacctcaagtgcaagtgcactattaactttcacagcacaaagatagatgaaatcgtgctttttgctgttttttcgaacatatcctaactgtccattgcgcaattacccggtaaaatacgcagaattttcctgggattggtcaaaaggagctcatcctgattatggttagtagtttcacatctgccccacgcagcggtttttactattttgcgcaaggctggaagctcgtcagccaacctgggattcggcgtttcgttattttaccgctgctggtcaatattttgttgatggggggcgcattctggtggctctttacacagctcgatgtctggatcccgactctcatgagttacgttccggactggctacaatggctgagttatctgttgtggcctctggctgtcatctctgtgctgttagtgtttggctatttcttctccacgattgctaactggattgccgctccgtttaacggtttattggctgaacaactggaagcacgattgactggcgctacaccgccagataccgggattttcggtatcatgaaagatgtgccgcgaatcatgaaacgcgaatggcaaaaatttgcctggtatctgccgcgcgcaattgtattactaattctttacttcatccctggtattgggcaaaccgtcgcgccggtactgtggttcctgtttagcgcctggatgttagccatccagtattgcgattaccccttcgataaccacaaagtgccgtttaaagagatgcgcaccgccctgcgcacacgcaaaatcaccaatatgcagtttggtgctttaaccagcctgtttacgatgatcccgctgcttaatctgttcatcatgcccgttgccgtttgtggcgcgacggcgatgtgggtcgattgctatcgcgataaacacgcgatgtggcggtaacaatctaccggttattttgtaaaccgtttgtgtgaaacaggggtggcttatgccgccccttattccatcttgcatgtcattatttcccttctgtatatagatatgctaaatccttacttccgcatattctctgagcgggtatgctacctgttgtatcccaatttcatacagttaaggacaggccatgagtaagatttttgaagataacagcctgactatcggtcacacgccgctggttcgcctgaatcgcatcggtaacggacgcattctggcgaaggtggaatctcgtaaccccagcttcagcgttaagtgccgtatcggtgccaacatgatttgggatgccgaaaagcgcggcgtgctgaaaccaggcgttgaactggttgaaccgaccagcggtaataccgggattgcactggcctatgtagctgccgctcgcggttacaaactcaccctgaccatgccagaaaccatgagtattgaacgccgcaagctgctgaaagcgttaggtgcaaacctggtgctgacggaaggtgctaaaggcatgaaaggcgcaatccaaaaagcagaagaaattgtcgccagcaatccagagaaatacctgctgctgcaacaattcagcaatccggcaaaccctgaaattcacgaaaagaccaccggtccggagatatgggaagataccgacggtcaggttgatgtatttattgctggcgttgggactggcggtacgctgactggcgtcagccgctacattaaaggcaccaaaggcaagaccgatcttatctctgtcgccgttgagccaaccgattctccagttatcgcccaggcgctggcaggtgaagagattaaacctggcccgcataaaattcagggtattggcgctggttttatcccggctaacctcgatctcaagctggtcgataaagtcattggcatcaccaatgaagaagcgatttctaccgcgcgtcgtctgatggaagaagaaggtattcttgcaggtatctcttctggagcagctgttgccgcggcgttgaaactacaagaagatgaaagctttaccaacaagaatattgtggttattctaccaagtagcggtgagcgttatttaagcaccgcattgtttgccgatctcttcactgagaaagaattgcaacagtaatgccagcttgttaaaaatgcgtaaaaaagcacctttttaggtgcttttttgtggcctgcttcaaactttcgcccctcctggcattgattcagcctgtcggaactggtatttaaccagactaattattttgatgcgcgaaattaatcgttacaggaaaagccaaagctgaatcgattttatgatttggttcaattcttcctttagcggcataatgtttaatgacgtacgaaacgtcagcggtcaacacccgccagcaatggactgtattgcgctcttcgtgcgtcgcgtctgttaaaaactggcgctaacaatacaggctaaagtcgaaccgccaggctagactttagttccacaacactaaacctataagttggggaaatacaatgttccagcaagaagttaccattaccgctccgaacggtctgcacacccgccctgctgcccagtttgtaaaagaagctaagggcttcacttctgaaattactgtgacttccaacggcaaaagcgccagcgcgaaaagcctgtttaaactgcagactctgggcctgactcaaggtaccgttgtgactatctccgcagaaggcgaagacgagcagaaagcggttgaacatctggttaaactgatggcggaactcgagtaatttcccgggttcttttaaaaatcagtcacaagtaaggtagggttatgattagtggcattttagcatccccgggtatcgctttcggtaaagctctgcttctgaaagaagacgaaattgtcattgaccggaaaaaaatttctgccgaccaggttgatcaggaagttgaacgttttctgagcggtcgtgccaaggcaagtgcccagctggaaacgatcaaaacgaaagctggtgaaacgttcggtgaagaaaaagaagccatctttgaagggcatattatgctgctcgaagatgaggagctggagcaggaaatcatagccctgattaaagataagcacatgacagctgacgcagctgctcatgaagttatcgaaggtcaggcttctgccctggaagagctggatgatgaatacctgaaagaacgtgcggctgacgtacgtgatatcggtaagcgcctgctgcgcaacatcctgggcctgaagattatcgacctgagcgccattcaggatgaagtcattctggttgccgctgacctgacgccgtccgaaaccgcacagctgaacctgaagaaggtgctgggtttcatcaccgacgcgggtggccgtacttcccacacctctatcatggcgcgttctctggaactacctgctatcgtgggtaccggtagcgtcacctctcaggtgaaaaatgacgactatctgattctggatgccgtaaataatcaggtttacgtcaatccaaccaacgaagttattgataaaatgcgcgctgttcaggagcaagtggcttctgaaaaagcagagcttgctaaactgaaagatctgccagctattacgctggacggtcaccaggtagaagtatgcgctaacattggtacggttcgtgacgttgaaggtgcagagcgtaacggcgctgaaggcgttggtctgtatcgtactgagttcctgttcatggaccgcgacgcactgcccactgaagaagaacagtttgctgcttacaaagcagtggctgaagcgtgtggcagccaagcggttatcgttcgtaccatggacatcggcggcgacaaagagctgccatacatgaacttcccgaaagaagagaacccgttcctcggctggcgcgctatccgtatcgcgatggatcgtagagagatcctgcgcgatcagctccgcgctatcctgcgtgccagcgctttcggtaaattgcgcattatgttcccgatgatcatctctgttgaagaagtgcgtgcactgcgcaaagagatcgaaatctacaaacaggaactgcgcgacgaaggtaaagcgtttgacgagagtattgaaatcggcgtaatggtggaaacaccggctgccgcaacaattgcacgtcatttagccaaagaagttgatttctttagtatcggcaccaatgatttaacgcagtacactctggcagttgaccgtggtaatgatatgattagtcacctttaccagccaatgagtccgtccgtgctgaacttgatcaagcaagttattgatgcttctcatgctgaaggcaaatggactggcatgtgtggtgagcttgctggcgatgaacgtgctacacttctgttgctggggatgggtctggacgaattctctatgagcgccatttctatcccgcgcattaagaagattatccgtaacacgaacttcgaagatgcgaaggtgttagcagagcaggctcttgctcaaccgacaacggacgagttaatgacgctggttaacaagttcattgaagaaaaaacaatctgctaatccacgagatgcggcccaatttactgcttaggagaagatcatgggtttgttcgataaactgaaatctctggtttccgacgacaagaaggataccggaactattgagatcattgctccgctctctggcgagatcgtcaatatcgaagacgtgccggatgtcgtttttgcggaaaaaatcgttggtgatggtattgctatcaaaccaacgggtaacaaaatggtcgcgccagtagacggcaccattggtaaaatctttgaaaccaaccacgcattctctatcgaatctgatagcggcgttgaactgttcgtccacttcggtatcgacaccgttgaactgaaaggcgaaggcttcaagcgtattgctgaagaaggtcagcgcgtgaaagttggcgatactgtcattgaatttgatctgccgctgctggaagagaaagccaagtctaccctgactccggttgttatctccaacatggacgaaatcaaagaactgatcaaactgtccggtagcgtaaccgtgggtgaaaccccggttatccgcatcaagaagtaattcttgccgcagtgaaaaatggcgcccatcggcgccatttttttatgcttccgccagcggcggcaaaatcaattcatcgctctcatgctgctgggtgtagcgcatcacttccagtacgcgcaaccccgctcggtgcactgcatcggttaacgccttccctttcagcaagccactgatgagctgagcacaaaacaggtcgccagtccctttcaggtcggtttttacccgactatgggaaatgacattcacgctgtcggcagtgaccaccacaacctgcatctcctgattttcttcattaccggaggcgctggtaaccaccacccattttaatgtgtcactaagcagactttttgcggcagcaatggcactgtcgagatcgcggcaatttttaccggtcaggatttccaactcaaagatattgggggtaattccctgcgccagcggcagtaaatattgtcgatacgcttcgggaaggtcaggtttgacataaattccgctatcaatatcgccaatcaccggatcgaccatgatcaataggtcaggatggtctttgcgtagcgcagtcagccactcggcaaggattttgatttggcttgccgttcccatatagcccgtggttacagcacgaagttggcgcagcgcatcacgctcctgaagcgcacgcaaatagccgctaaaccattcgtccggaatcgcaccaccgtagaaagtgtcataatgcggcgtattgctcagcaataccgtcggcacggcaaagacattcaggccgttctgtttgatagcaggcacggcaatgctgttgcccacgctgccgtaaaccacctggctctgcacggcgacgatatccgcctgcagtgccctactcttatcgttaaacaacaacaaactactcatttaattttttctccttgccgatgatcctcatcgtaatccaaccgaaactttacctgattctggcagtcaaatcggctatcacaaaacaaggataaggtaattcaatgaagaaaatcatttgtctggtcattacactactaatgacactccccgtttacgcgaagttaactgcccatgaagaagcccgcatcaacgccatgctggagggattagcacagaaaaaggatttgatatttgtgcgcaacggtgatgaacatacctgctatgaagcggtttctcatctgcgtctgaagctcggcaatacccgtaaccgcattgacactgccgagcagtttattgataaggttgctagcagcagtagcattactgggaagccgtatattgtgaagatccccggtaagagcgatgagaacgcacagccttttttacatgcgttaattgcgcagacggataaaacggtgcctgcggaaggaaattaatccgctttgggaaggcatttacaggaggtaacatgaaaaaacgctttatttatcacgatgaaaaaagcaataaattttggtggatagattacgaaggggatagtttagctgtcaactatggcaaggtaggtagtattggtaaattccagacaaaagagttcgataatgaagaacagtgtctgaaagaagccagtaaattgattgccgcaaaaatgaagaaaggctatcaagaagatccaaagtttaacttcatggatcgctactattttgatgatgaagaaattgggttacatgttaaaacgagtcacccaaacttccagtgccattttactgatccactttatatgtgttgctgggatgaagaatctccttttggcagcgatgaaggtgctgatgctctaaacgttcttgaaaatagcctccgtaaagagccggatctggactgtgctgatttccctcaaatgttaattgaaactatgtggggtatgaaatacatcgctatggacagtattcttgaagaggatgttcgtgcgcaattactagtcgatgaaatgagcactatccagagcaatatgattacctacgcaactgcattcggtcagattaaagtcatgggtaaaatctcccataaacttaaaaagatgggactcaatgcactagcgcgtcatcagcttaccgcaaaaattcttcaatggggtgacggtcaggacagtccaatacttcaaaaaatgattgatgaccttacggcgtttcctcacgaaaattaaatactgcatttgtcggcagcaacaactgttaaaaaagtgcgctttgtttatgccggatgcggcgtaaacgccttatccggcctacaaaatcgtgctaattcaatatattgcagaaaccttgtaggcctgataagcgtagcgcatcaggcagttttgcgtttgtcatcagtctccgatgctattaatccttaaatccccgccccctggctaaaatgctcttccccaaacaccccggtagaaaggtagcgatcgccacgatcgcagatgatcgccaccaccaccgcgtcagggttagcttttgccacccgcagtgctccggcaaccgcgccgccggagctgacgccacagaatattccttcccgcaccgccagttcgcgcatggtgttttccgcatcgcgctgatgaatatccagcacctcatccaccagagaagcgttgaaaatccccggcagatattccgtaggccagcggcgaatgccgggaatgctgctgccctcttccggttgcaggccgacaatggtcaccggtttggattgttcgcgcataaagcgactgacgccggtgatagtgccggtcgtccccatgctggagacaaaatgagtgatgcgcccgccggtttgctgccagatttccggcccagtggtggtgtaatgcgcataagggttatcgggattattgaactgatcgagcagctttccttcgccacgattcgccatctccagcgccagatcgcgcgcaccttccatgccctgctctttggtgacaagaatcagttccgcaccataagcacgcatcgccgcacggcgttcctggctcatgttgtcgggcatcagcaatttcatgcgatagcctttcagcgcggcaatcattgccagcgcaatgccggtgttaccactggtggcttcgattaagacatcacccggtttaatttccccgcgcttttccgcctcgacgatcatgctaagtgccgcacgatctttcacgctacctgccgggttattgccttccagttttaaccacacttcactgccgttatccggccccattcgctgcaacttcaccagaggcgtattgcctattgtttgttctaatgtactcacgatctctatccatacgtggtgttgcctgatgcgacgcttgcgcgtcttatcaggtctacaggttacaaaccttgccattaaaaagcccggatcgcgggaagcgcctccgggcgtttaacattcactcaacctatcaggcgctttgtgcgagagcaagttcctcatcgcgggtttcgatacgctcgtcgccgttatacagccgcgcatgttgcagaccaacgaataaacgctcgccacgctgcggggcatcgtcgccatgcatcacgaccgtcagcggttcgttgtaccaccccagcggctgcaccactaattgggtgtagtgacctttcgggctggcttccagtacctgtaccggcagcgggctatcgaggctggtacggcggctgatatccacttcccaagggcgcaggaagagatccaccggcccctgatacgcaggtgtgtagcccagcggccagcgatgcgcgccaacatggaactgcccgccgcgaatggttccctgcaggcggttcacttcgcccataaattcgagcacaaaacgggtcgccggttcgcgccatacctgatccggcgcgtcagcctgttcaatattgccctggctcatcacaactacacgatcagctacttcggtcgcttcttcctgatcgtgggtcacaaaaacgctggtgaattttagttcttcatggagttgacgcagccagcgacgcagctctttacgcacctgcgcatccagcgcgccaaacggttcatcaagcagcagaatttgcggttccacagccagcgcgcgcgccagcgccacgcgctgtttctggccgccggaaagctgcgccggataacgatccgccagatgggcaagctggaccatttccagcaattttgtcactttcgctttgatggctgcggcattcgggcgctcgcgacgcggcagcaccgtcaggccaaaagcgatattgtcgaacaccgtcatatggcggaacagcgcgtaatgctggaacacgaaaccgactttacgatcacgtgcgtgcaggcggctcacgtcggtgccgtggaagcgaatatgcccgctggtttgatgctccagcccggcgataatgcgcagcagcgtggttttcccggaaccggacggccccagcaacgcgaccatctgaccactaggaatatccagactgatatcgttcagcacctgggtgcgaccaaagctcttcttaatattggcaatctcaatgctcatgatgttcctcctgctgtgcgcgtttttcctgattctccaggcgccactgcaacatactttttaaaaacagggtgataatcgccatcagcgttaacagcgccgcagcggtaaaggagccgacggtgttgtagtcctgctccagcaattcaatctgtaacggcaggctcagggtttcgccgcgaatgctgccggaaaccacgctcaccgcgccaaactcgccaattgcgcgggcgttggtcaacaccacgccataaagcagcgcccagcggatgttcggtaatgtgacgcgacggaacatctgccagccggacgcgccaagcaaaatcgccgcttcgtcttcctggctgccctggcttaacatcaccggcaccagttcgcgcaccacaaacggacacgtcacgaagatggtgaccagcaccattcccggccaggagaacataatttgcaggttatgctcgtcgagccaaccgccgagcgggccgttagagccgtagaacagcaaatacaccagaccggcaaccaccgggcttacggcaaacggaatgtccagtagcgtcagcagtaactggcgtccagggaagttaaagcgcgtcaccagccaggccagcagaatgccgaacaccaggtttaccggtacggcaatcagcgcgatcatcaccgtcagccagatggcgtgcagcatgtccggatcggccagattctgtaaaaccggcatcagccccttgctgaatgcctgcacgaagatgtaaatcatcggcaccagcaggatgaacgcgctaaccagcatcccgatgccaatcagaaaccatttgccccagttaatcgggcgcgcgtcataacgcttcaattgggtaacttccgccattaatgacctaccacacgccgaccaaagcgactttgcagagtgttaatactgaacagcagcagcagagatgccgcgaggatcacgctagcaatcgcgctcgctgccgggtaatcaaactcctgtaagcgcacaaaaatcatcaggctcgtcacttccgtcttccacgcgatatttccggcgataaaaatcaccgcgccaaattcaccaagactacgggtaaagctcagcgccacgcccgccaccagcgccggagaaagctccggcagcaccactttgcagaaactctgccagcgcgttgcaccaagcgtttccgccgcttcttcatattccgggcctaactcttccagcaccggctgcacggtacgcaccacaaacggaatgctggtaaaggccatagccaccgcaatccccagccatgtataggtgactttgatatcaaacttcgccagccattcaccgtaaaaaccgtttacggaaaagaggctggccagcgttaaaccggcgacagccgttggcagcgcaaagggtaaatccatcagcgcatcaagcagcgtgcggcctgggaagcgatagcgggttaggatccacgccatcagcagaccgaaaacgccgttaaaaatgcttgccacaaacgcgctcagcagcgttactttgtaggccgcgaccacctgcgggttggtgatcacctcccagtactgcgcccagctcatctgggccagttgcatcaccagcgcggagagcggcagcagcaaaatcaggcacacaaacagcagactggtgccgaggcttaaggtaaagcccggcagcacgcgtctggaggagacagcaaacatcagttacgccccgccgctaacagcttgtctaactcgccgccgctggtgaagtgggttttcatcacttccggccaggagccaaatttgtcttccacgcggaacagctcggtctgcgggaatttgtctttcagtttgtccatcacctccgggttattcacgcggtagtaatagtcggtgatgatggtttgcgcctgcgggctatagagccagttcagataggctttggcggctttttccgtaccgttggcctgcacgtttttatcaacccacgccaccgggaattccgccagaatgttggttttcggaatcaccacttcaaagccctgcgcttcatactgtttacggatgttgttcacttcgctttcgaagctaatcagcacatcgcccaggccgcgctcggcaaaagtggtggtcgcgccacgaccgccagtatcgaacacttcaacgtttttcaggaactgggtcataaactgttcggttttgcctttgtcaccaccgtcagctttatccgctgcgccccatgccgccagataggtataacgcgcgttaccgctcgttttcgggttcgggaaaatcagcttcacgtcggagcgcaccaggtcgttccaatcgtggatattcttcgggttacccttacgcaccaggaagcccatggtggagtagaacgggctgctattattcggcaggcggctctgccagtcggccgggatcagcttgcctttatcgtgcaggatttgtacgtcggtcacctggttataagtgacaacgtcggcttttaagccctgtaaaatcgccagcgcctgtttactactcccggcatgagattgttttatcgtcagtttgtcgccgccgttatcttttgcccattgttgctcaaacggcggattcagggcggcaaacagctcgcgggagacgtcataagaactgttcagcagttccgttgcctgtacatggcccgccagcagcagagaagcgaccagcgcgagactgttctttttcagtaagttaacggccattgcgcacccttataaatttaatgactttctaatagccatcatatttataacggacgtgaaaggagtaacggttttatataccgtttggtgatttggaagttgaaaagggaataagaacttggttcaacaggcgtaattgttgcagtcagtttggacacgaacagcgcggagaaaccggagcgtacacatagtacgtgaggatttcgagcactgcccggggccaaaatgacaaataaaatagcctggtgaacttagttcaagacgaaatcctccccacaaatgcagggaggaaacagaggtgaatcagataccgacgctaaccgtctccggcagtgtgctgccgccatcaatcacattctgtgtaccggttaaatagctggattcatcgcttgcgaggaaggccgccagttcgccgacttccagcggatcggcgaggcgacgcatcgggattgctttcgccatttcagtcagcacgctctctggatcttccgggttgctctggcgggcaatgctttccgccattggtgtgcgcacgtatcccgggcaaatggcgttaacgcgaataccagactgcgcgtactccaccgccaggctttttgtcaggccaacaatcgccgctttcgttaaggcgtacgccgtttcgccaggatcggccaccatatcaccagtgacactagacatcatcacaatgcgaccatctttgcgggcaatcatctccggcagcaccgccttcgtgacgttccatacgcctttaatattgatgtcaatatggaaatcgcgatcgtcatcgctcatatcgaggaaactgcccagacgacaaacgcctgcgttattcaccaggatatcaatgcgcccttctttttccttcgcgcgtttgatagctgcggctacgctcgccgggtcacgcacatcggcgacaaccgccgtacagcgatgaccacgaccacacagttcgtccgccagcttttcgatctcaggggagatatccagcaagattaggttcgcgccatgacgtgcaaaagttctggcaattccttcgccaattccctgcaatgcgcccgtaatcagtgctgtcttgcccgtgagtttacccattttaatgctctccttgttaatacagagcgttacactccattccctctgaaaatacaggataaacaaaatattgctgcggatcagctcactaattcaggaaaatctcaatccagtcgctgctttatgcatcatttcaggcgttgtgttagctcactgctgcgctgaatcattttcaaactctccacatcattgagttgcacaaggccaacaaacagtaaatcggtaacagaattttgcgccgtgcgggtagacatgctgctgctacgccattcggtttctccggaaacggtatcgagggtgaaatgcgccagccgccgcagcggagagtcagtcagagaagtaatggcaatcaccgttgccccctgctttcgtgccgcttctgcgcacaagacaatctcttttttactgccgctgtaagagatagcgatttgtacatcgccttttttcaacgcctgagaaacggtggcttgtacgtgcgtgtcggcttcgcaggccacgcgatagccaattttcatcagtttgaagctcagatcgcgccccaccagcgcgcttccgcccaggcccgttatctggataaacggtgctttactgatgacctcaatgattttttgcagccgcgcgtaatcgagcaacgcgcaggtttgctccagcgccagctctttttcgcgattcagtttgcgcgcgatcacttccaggctatcatcactggtaatgctactgtgcaggtgcagtgccgtggcattcgttttctcccggctggcactgtattcgcctattaacgccatacgcaattcagtaaatccttgcgcgccgagtttttgggcaaatttcactatgctgctctggctaatgccgagctgtttcgccatctgccgactagaaacggattgcagctcactcacgttggcctgcagaaagtcagcgattttttgctcgttttcggtgaattcactccccgcattgcttattttcgtcaggtacaacatcttccactctcctgggctggcagcataaattccgcttaagttcttatgacgctcttcacactctgcgagtgtagactcaatgattcctttaagcctgtcaattcgggatatatgattccatacatctgcaattatttgatcgtaaatagtaaggtcaccaccgatgcaatttgaaaagatgattactgaaggcagcaacaccgccagcgctgaaattgaccgcgtaagcacgctggaaatgtgccggattatcaacgatgaagataaaaccgtaccgcttgccgttgagcgcgtactgccggatatcgccgcggcgatcgatgttatccacgcccaggtaagcggcggcgggcgtctgatttacctcggtgcgggaacatccggtcgtctggggattctggatgccagcgaatgtccgcccacctacggcgtgaaaccgggtctggtggttggtttgattgctggcggcgaatatgccattcagcacgcggtggaaggcgcggaagatagccgggaaggcggtgttaatgatctgaaaaatattaatttaacggcacaggatgtggtggttggcattgctgccagcggtcgcacgccgtatgtgattgccggactggaatacgcacgccagctcggctgccgcacagtgggaatttcctgtaatccggggagcgccgttagtaccaccgctgagtttgccattacaccgattgtaggtgccgaagttgttaccggttctagccggatgaaagcaggtacagcgcagaaactggtgctcaatatgctttccaccgggctgatgattaaatccggcaaagtgttcggcaacctgatggtcgatgtggtcgccaccaacgaaaaactgcatgtgcgacaggtcaatattgttaaaaacgccaccggatgtagcgcagagcaagcggaagcggcgttaattgcttgcgagcgcaactgtaaaacggccattgtgatggtgctgaaaaatctcgatgccgcagaagctaaaaaacgcctggatcaacacggcggctttattcgtcaggttttagacaaggaataacccatggccaaagagatcagcagtgaacttctgaacaccattcttacccgtgtcggcggaccgggaaatatcgccagttgtggtaactgtatgacgcgcctgcgtctgggtgtacatgacagtagtctggttgatcccaatatcaaaacgctggaaggcgtgaagggcgtcattttgaccagcgaccaggtgcaggtcgtttttgggcctggtaaagcgcatcgtgccgcaaaagcgatgagcgagctgctgggagaagcaccggtacaggatgccgcagaaatcgccgcccagaacaaacgtcagttaaaagccaaacaaacctccggcgtgcaacaatttctcgccaaattcgccaccatcttcacgccgctgatccccggttttattgccgccggtctgctgctggggatagcgacgttaattgccacggtgatgcacgttccggcagatgctcagggaacactacccgatgcgctgaattttatgaaggtgttcagcaaaggtttgttcactttcctggtgattctggtgggctataacgccgcccaggcatttggcggcacgggcgtaaatggcgcaattatcgccgcgctctttttgctcggttataaccccgcagcgaccaccggttactacgccggttttcacgatttctttggtctgcccatcgatccgcgcggcaatattatcggcgtgctgattgccgcgtgggcctgcgcccgcattgaaggcatggtgcgccgctttatgccggacgatctcgacatgctgctgaccagcttaatcaccctgctgatcaccgctacgcttgcgtacctgatcattatgccgctgggtggctggttattcgaaggtatgagttggctgtttatgcacctgaacagtaatccgttcggttgtgcggttttagccgggctgttcctgatcgccgtggtatttggcgtgcatcagggctttattcctgtttacctcgcgttaatggacagccagggattcaacagcttatttcccatccttagtatggcaggcgcgggccaggtgggcgcggcgctggcactctactggcgggcgcaaccgcacagtgcgctacgcagtcaggtacgcggggcgattattcccggcctgctgggcgttggtgaaccgctgatttacggtgtcaccctgccccgcatgaagccgtttgttaccgcctgtttaggcggcgcggcgggcggtttgtttatcggcctgatagcctggtggggtctgccgatgggcttaaacagcgcctttgggccgtctggtctggtagcgctgccgctgatgacttccgcacaaggcatccttccggccatggcggtttatgctggcgggattctggtggcatgggtttgcgggtttattttcaccacgctctttggctgccgtaacgtcaatctggactgatatcatgaaacggacaatgctctatctttctctgctggctgttagttgtagcgtcagcgccgcaaaataccctgttctgacagaaagcagcccagagaaagcagggtttaacgtcgaacggcttaaccagatggatcgctggattagccagcaagttgatgtcggttatcccagcgtaaacctgctgatcattaaagataatcagattgtgtatcgcaaagcctggggagcggcgaaaaagtacgatggcagcgtgttgatggaacagcctgtcaaagccaccaccgggacgctgtatgacctggccagtaacaccaaaatgtacgccacgaacttcgccctgcaaaagctgatgagcgaaggcaaactgcatcctgacgatcggattgcgaaatatattccggggtttgccgatagtccaaatgacaccattaaaggcaaaaacaccctgcggatttctgacctgctgcatcacagcggcggtttcccggcagatccgcaatacccgaataaagcggtcgcgggcgcgttatattcccaggataaaggccagacgctggagatgatcaagcgcacgccgctggaatatcagcccggcagcaaacatatctacagcgatgtcgattatatgctgcttggatttatcgtcgagagcgttaccggtcagccgcttgaccgctatgttgaagagagcatttatcgcccgctcggcctgacacatacggtatttaacccgctgctgaaaggctttaaaccgcaacaaattgccgccacggaattgaacggcaatacccgcgatggcgtgatccatttcccgaatatccgcacctccactctctggggtcaggtgcacgatgaaaaagccttttatagcatgggcggcgtttccgggcacgcaggtttgttttccaataccggcgatattgcggtgttaatgcaaacgatgctgaacggcgggggctatggtgatgtgcagctgttcaatgcggaaacggtgaagatgttcaccaccagctctaaggaagatgccacttttggcctcggctggcgcgtgaatggtaatgccaccatgacgccgacgtttggcacgctggcaagcccgcaaacctacggtcacactggctggaccggaacggtgaccgttatcgatccggtgaatcatatgacgattgtgatgttaagcaacaagccacatagcccggttgccgatccgcaaaagaatcccaatatgttcgaaagcggtcagttgccgattgcaacttatggttgggtagttgatcaggtgtatgcggcgttaaagcagaagtaataaaaaggccagtcagtaatgttactggctggtctgagagtgctgacaaacgcaaaactgcctgatgcgctacgcttatcaggcctacgtggagcccacaatatattgaattagcacgatttcgtaggccggataaggcgttcacgccgcatccggcgtgtacaacgcgcacttggtcaacaatctgaggccagtcagtaatgttactgcctggcctttaatcaatgaatcagaaacgcttacagcgccatcaacttgtccaggctcggtgcgaaataatagccgccggttaccggtttggtgaaacgcaacatcgcatcacgcttaccatcggtatcgccaaacatgctcagcagttgctgctcaatgttatgcagacgcgcgcagtaggcgcagaagtacagaccgtgagtgccactggcagtgccgtacggcaggctctggcgaacaatcttcagccctttgccatcttctttcagatcaacgcgggtgaggtgagaggtttccggacgttcgtcgccgtcgatctcttcgttggcctctttggtgcgcccgatcaccatctcctgatcgtgaacgctcatccggttgagctgcttcaggttgtgttcccaacgctggacaaacacatagctgccgcccgcatccacgccgtctttgataaccgccacttcgcgacgcgtctcttcacccgccgggttttccgtaccgtcaacaaagccgctcaggtcacgctcttcaacccaacggaagccgtggatctcttctttcacttcaatgcagtcaccaaaggcttccatcgccgcctgggcgacagagaagtttacgtcgtgacgcagagaaagaatgtggatcaacacatcgaactgggtcgtcggcgcaaggcctttaccgtagcccggaaaatctttcagctcttctgccccaacgccgccgctcagagcgcgccaggtgttgttaccaaaggcaaccaccgcaccaagatgcgcgtccgggaatttcgcttcaaaagttgccagtttgtcggcaaatgttttactggccgcacgcagggcgtcaacttcccctttcacgttggcttcgatccaaatcgccgcgcggcaatgttctggcaaaatgccactctgaacctgagacattgttcctcctgaaaataataatgccacgcaatccgtggcattgttgagcgctattttacgtgttttttcgcggcggcggtttgttcagacgcaaattaacgccgccagataattttactgactttccagtttttcagggtatcgtcgctaggcattaacccttcaggaccacgccattccccgctgaactggtagctaatatgttgactgccttcggctttacattcgacggcacgattatcatcaccatcagctttttggcaattgccaaatgctttgctgtaaaggtcgctaaacggtgtaccgattttaacaccggtgtcagcaggaatatcgctatccagcacgtcaatgcgactgatcgtgccttgatcgccgttaatcaccatcgccacgttgtcgcccttcatcacttcaaaaaagcgcaccacgttgccgttcgcggttttcattccgctgcgcaggcgataatcgccatcaagcgcatcggcaatggcttgttcttgcagtggtgtggacgccgttaattcacccacgccctgctcgctcactttggtggagctcccaaaccagttccacgggttagcggcagaccagttaacactgctcatcgtggaacagccggtcagcatcaatggcatagcgcataacattaaacgcaggcttttcatgtcacttcctttggttattcaataacgttgcttggagtgcaaattcaccaaaaagtgccgttattcttttacttcataaaaacaagcgcgtaaacgtcgattggtcagcagccagattaacgccacaatatccgccactaccagcgccagaccgataccgctaacggattcaccgttcagccacagccacggttgccagcaaagtaaaaccacctgcgccaacagcaacagaaaatagagtacacgccaggtgcgaggaaacgtagcccgccgaccgctcaacaaaaacgccagcaccgccggaatgccaggaatcagccccagccagaaattatcgtgatcgggataaaacagatttagcagcgcagtaccctgctcgcggctcgcaccggcaatgacaaacagcacccaggttcgcgcctgaagcaatagcacaagccagaagagcaagggtaaacgcaggcgaccgtgcgcatcataatggacaggatgaaactcagtactcttcatcttcaatcaaacgcttacccagactcagcacgtcggcgtgttcatatcccaggcgttcatacattccgagcaccatgtcgttatcttccggcacattgatctgaattttcgggcagccacgagcaatcagctttttctccagccgattaagcaacgcattggcaatcccacgcccacgaaactctggatgcacgccaagataataagcagacccgcgatgcccgtcataaccgcccatcaccgttccgaccacgtcaccgtttacctcagcgaccaaaaacaaactgacgtcatggttcatcttacgctcgatgtccatttccggatcgttccacggacgcagcaagtcgcaacgctcccaaagggtgatgacctcttcgaaatcttcctggcgaaatacgcgtatctccatggtattcgttacctttttgcgggttaaaaggctgattatggcgtgaacggtcgaattagccaatatctgacgaaaatcggttgaaaaagtggcataatggggagttgtcaactattgaaatgaaaagtaaaacaattctcaacagcaaaccgtcgtaacggattacgcgatacgatataacatctggaactttattattacaactcaggccgtatgagcacttttaaaccactaaaaacactcactagccgccgccaggtgctgaaagccggtttggctgccctgacgttgagtggaatgagccaagccatcgccaaagacgaacttttaaaaaccagcaacggacacagcaagccgaaagccaaaaaatctggcggcaaacgtgtcgttgttctcgatccaggtcacggcggaattgataccggagcgatcggacgcaacggtagcaaagaaaaacatgtggtgctggcgattgctaaaaacgtccgttccattttgcgtaatcatgggattgatgcgcgtttaacgcgttctggcgatacgtttatcccactttacgatcgcgttgaaatcgcccataaacatggcgcagatctgtttatgagtattcatgccgatggctttaccaacccgaaagctgccggtgctagcgtatttgccctctctaaccgtggggcaagtagcgcaatggcgaaatacctgtctgaacgcgaaaaccgcgccgatgaagttgccggtaaaaaggcgactgacaaggatcacctattgcaacaagtgctgtttgatctggtgcaaacagataccattaaaaatagtctgacgctcggcagccatattctgaagaagattaagccggtgcataaactgcacagccgcaacaccgaacaagcggcatttgtggtgttgaaaagtccgagcgttcctagcgtgctggtggaaaccagctttatcaccaacccggaagaagaacggctgttaggcacggcggcgtttcgtcagaaaatcgccacagcgattgctgaaggcgtgatcagttatttccactggttcgacaaccagaaagcacatagcaaaaagcgataagttatgaaacccgacgcacaccaggttaaacagtttctgctcaaccttcaggatacgatttgtcagcagctgaccgccgtcgatggcgcagaatttgtcgaagatagttggcagcgcgaagctggcggcggcgggcgtagtcgggtgttgcgtaatggtggtgttttcgaacaggcaggcgtcaactttagccatgtccacggtgaggcgatgcctgcttccgccaccgctcatcgcccggaacttgccgggcgcagtttcgaggcgatgggcgttagtctggtagtgcatccgcataacccgtatgttcccaccagccacgcgaatgtgcggttttttattgccgaaaaaccgggtgccgatcccgtctggtggtttggcggtggcttcgacttaaccccattctatggttttgaagaagatgctattcactggcatcgcaccgcccgtgacctgtgcctgccatttggcgaagacgtttatccccgttacaaaaagtggtgcgacgaatacttctacctcaaacatcgcaacgaacagcgcggtattggcgggctgttctttgatgacctgaacacgccagatttcgaccgctgttttgcctttatgcaggcggtaggcaaaggctacaccgacgcttatttaccaattgtcgagcgacggaaagcgatggcctacggcgagcgcgagcgcaatttccagttatatcgtcgcggtcgttatgtcgagttcaatctggtctgggatcgcggcacgctgtttggcctgcaaactggcgggcgcaccgagtctatcctgatgagtatgccgccactggtacgctgggaatatgattatcagccaaaagatggcagcccagaagcggcgttaagtgagtttattaaggtcagggattgggtgtaactccctcacccccactcccgcatccgctgatgcagcgtcagactcggcttctcggaaaacagctgctggtaatccgtggcaaattgccccagatgccagaatccccactgcatggcggcgtcttttaccgtcatactttggctccacggacttatcagttcgcggcgtacggcgttcaggcgaatgcgtttcagccacgcgttcgggccaatgcctaaaatagcgtgaaacgcgttttgtagcgtgcggcggctgacatgcagttgattacacaaatccagcaccgtcaccggttcggacatgttttccagcacatattcacgggcgcgggaaagcaatcgacggtaactctgatgactgatgctttccgccgtcaccattggttgcgcttcttccagcatggcccccatcgccattagcaaattatcccccagcacttttcgcactgcaggctgatggagattttccggattctcgcaaaacgtcgccagcgcctgttggacaaagccccacagcgcggctttatgctgctctttcacttccagcgcgctctggttacgcaacatatgtaatacccgatccgggttatgcaaaaagttagcctgccgggtgatgacatcttcagaaagcaccacgcccaggatcgtgtaatcatccggcgtgctcagttcaaattcagtgccaccagggcgggtggcgatttccgcgcttcccagacattggctaccgataaatccctgctcaccgcgcgtcgccggaatgccaaaccagaagctgttcggccagaccaggcagctctgacgcagcgccagaccggtgtattcacgaaaaacctgaatatcatcgagtagaatttccgtaaattcaccatgaaacttgcccggatgcagctgatcgtaaatctgctgccaggcggtaatcgttaaagcatgttcatagacatccgttgtctgtcgttgatgaacattatccacttcgaccttcggcgtgagcttcaggttttcgggtaagggttcatgataaagatggtgcaaattggctgtacgggtctttttcatgatgttaatgccgggtgttgtaggacacccggcacctccgacaggttaatggggcttgagacgataacgactactgcgtttacgtaacgtcccggcagaaaagagctgttcgagcgcatttctggctttttccagcggccagccaaagtgggcagccacttctcctgccgtcattccctgacgtacacttgttaacagcgccaacaactcgtcagcagattccgcgacgataactggcgcgtcgggttcccttacgggttgcttcggctggcggttaaagccagtaaccagccactgggtgtcatcgtctggccgaccgatctccttgcggctgatgacacgcccggtacgcatcgcggcagcacaacctgcgtccagcgccgcacgacacgccgccagatcgccttccaccaccagcgttaagcgaccagggtcaagcacttcgtgactgagcagacgaacgttagctgctttgagcatggcatccgctgcatctatcgcggcgaccatgccgtccacttccagcaatcccagtgcattgatcatcggcaacctccgttacgcacgctggattggattacgcgcgatttccagcactgcatcggtaaaggcgttacaggctgctttacacgctgcctggctaccggttaaaaatgctgcgctgtagttggtttcagacggtggcgggacataggtcgccagctgtacgtcggcagacttcagggctgcatcaatgccataggtcgcttccagcggcggtgccaccagatacgccatcggatcgccaagcgtgatcccggcggtactactgagataagaaccggtacggctaactacatgtgccaggaatgccgtatcttgcgcgtcattagcccactggaaagctgcgccattttcaatatgcgcaatcatcgcatccagacctgcacgcacttccgccgggtttggcccaccaagcataatcagcacttcaccggcagtcggactcgggccgtgtgcagcgcccgcatataggctgcggccatacaccacttccaccatcgcctgcttggtcgcttcatcagcggcaatgtaggtgacgtcatcggagtcggcagaaatcagaccgaggctacgaatatgcggcggcaatttcagttcacgcgcaaaatcggcgttaacggaggcaatcacccgcatagcggtgacagacggtcgaatcaaatctaaagctggcatgatgcctccttatcgggtcatgttgatgccggatgctttctgctccagcatacgtttcgccaaatccacaatgacggctgcggcttcaaccggcggcgtgccgccctggtgaatgttagagatacaggtgcgatcggcctcaacggtggtcgccatacgcgggctgtaaacggcgtagcaggagaggctttcactctgacccaaccccggacgttcgcccaccagcaggatcactactttcgcgccgaggatctcaccgatctgatcttcaatcttcacgcgaccataacgaacaaagaatggtgtaccgactttcagcccggcctgtttcaggcccgccatcagcggtggcaggatctcttcgtagttcacggtgatcgcatcagtactcaggccatcagaaataacgacctgtacgtccggattggcaacacactgcgctttcagcgcttcaacagcttctgcacacaggcggcggcccatatccgggcgagtcaggtagagatttttgtcgctaatttcagagcgtacttccagcaagccctgcgctttcacccactcttccggcacttctttcagtacggtatctttgctacgagagtgatcggccaggaaacgcagcagcgcctgcgtacgtggacgcggaccggcacgaccggtacaaacgcgggccacggtgctgcggcgcagttctgttaatacgtctgcgcgatgcggattttcaacaccaatccacgcttttgcttcagcggaacctaaatccagcgcacagctttcgctggtcaccggtgccgcacagttggtggtggcgcactttgcttcactcggcgcgggggccgcttgtcccatactcgccatcacgctgcgtacaatttcttcaatctgtttttgatccatgatatgttatctccgcgtcatcagaagaacagactcggatcgcccgcccgtttggtcaggcgaccgtttgccataatgcccatgctttccagccagcgttcaaactccggactcgggcgcaggttgagtaactgacgcacagtggcggtatcgtggaatgcggtggtctggtagttgagcatgatgtcatcacccagcggcatccccatgatgtagttgcagcctgcggtggcgagcaggatcatcaggttttcgttgaggttctggtcagcgtcagcgtggttggtataacagcagtcacagcccatagagatgccgctcagcttgcccataaagtgatcttctaagccagcacggataatctggcggtcgttgtagagatactccggcccaataaagccgaccacggtgttgacgataaacggatcgtaatgacgcgccagcccgtagttacgtgcttccatcgttacctggtctgcgccgaagttagcgccagcggatagcgcagagccttgtccggtttcgaagtagaggcagttttccccggcgatacggttgaactccgcgcccactgcgcgcgcttcgtcgagcatcgccagctccacgccaaactctttcagccctttttcgctgccacagatactctggaaaatcagcccgcccggtgcgccacgacggatcgcttcgatctgggtggtgacgtgcgccagtacacagccctgagttgggatgttgaatttgtcgatcacgccatagatggtatccaacacgcggcttaagttttccacgtcgtcagtcaccgggttaacgccgatcaccgcatcgcccaccccgaaggaaagcccttcgtagatttgcgcggcgatactttgcacgtcgtcacgggtgtcatttggctgcaaacgggcgctaaaggtgcccggaataccgatggtggtattggcctttttgattaccggcattttcttcgcgccgtagatcaggtccgcgttggagcaaatcttcgctaccgccgcgaccacttcgctggtcagccctttgcgggtaaaggcaatgtcgtccacgctggtttcatcgctcagcacatactcacgcagttcgctgatgctccagtttttaatctggttgtaggccgtttcgttaacatcgtcctgaatcagccgcgtcacgcagtcatcttcataggcaatcaccggattattgcggatgtccgctacggtcatttcgctcaacacctgctttgccgccacgcgctcctgactgcttgccgctgcgacgcccgccagcacatccccgctacgcagttcgttggctttagccagcacctcttttacatccttaaactgatatacattgccgaacaatgtggtctttagtttcataagtcgttccctcaggaaggaaatgcgagacttttcaccgtcaccggcacaacgcttccgccaaaaagaggcgtaccaatgtcgatatagtcccccgcgcggacaatcacttcgtcaatgactgccaacgggagttgttgtagctgtgggcgcaacaacatgcccagagctttaccaaagtcctgcccggccaccaccagcaggggatgcggattcggaaaacgcgcgacgaaatcgaccaacgcgttgatgaccgtcagtaccgcggcgtaacgcacaggcaggctggcgggaagcgccagcacgtacgcgtcagttttgggatcaagatccagctgaatcagcgcctgttgccaggcccccaccagatccgtttcatcaatcgggatcgccaccggcaaattgcgcagcggcagttgtacgccctcaagccagattgtgctgccagagaggctaagggtatgcgcgcccgcgccaatcaccgtggcgcgcacggtttgcgccggaaactgtacgttcatctcacgcaggcgcggatggtcatgcagcgcagttgccagcagcgggccaatatcggcaaaacagaacgggtcggcgggctggtggcgataacattcgcccacgccgccagaaagcgtaatgatttcgggcgtaacacctgcgggcagcaaaccggtttgcatcaatgcctgcgcgagcggactgagcgttccgtcaatcacttcgacaatcagttctgccatccgccgggtcacctgcaccagctgcgcgccggtcaggctacgggcgtcggtgcctgcaccgaagcactcatccacaatcatctgccccggtttatgagcgtaaaccacgcgcccgtggctgtcggtttccagcaggcgaccaccgacgttgaggcaggcagtgccgctgatttttccggcatcgaacagggcgtagttcgcggtgccaccgccgatgtcgatattcagtacccgacacagccgttgttcagaaagggtttgtgccccggctccgtgaccggcgatcacggattcgaggtgcggcccggcgctggcaacgacaaaatcgcccaggctctgagagagcgccatcaccgccgggcgagcattgcgggttttcgcgctttcaccggtgatgatgatggcaccagaatcaacgctttccggctcaatacccgcagcatgatattgctcgagtattaaggttttcagttccgcttcttttaaaccgccctgtttatcgacaggggtaaagaacaccggactttgccagctaatttcgcgtttaatgaattcgtagcgcggcacctggctcaccgccgcacggttaaccagctccagccgggagaaaatcacctgggtggtggtggtgccgatatcgataccgacgctcaatagctggcgagtgttcacgattgtgcctccgcttcggtttaagtcagctttgtgcctccgcttcggttttagtcgcggtcgcgtcttcttttggcaccagcatcatcgccacgccaatcgccgttacgccgccgatcaacttgccgacaatcatcgggaagatcatggcgttcatgttggcagcggcgaagcctaagtggtcgcccagggcgaaagcagcggaaacggcgaaggcgcagttgatgactttgccgcgggtatccatctgcttcatcatgccgaacatcgggatgttgttggcaagcgttgccaccatgccggctgccgcgatgttgttcatattcagtactttaccgacgctcatcagcggtttttcaaaccagcgagtcagcagcagcaccatcggatacgcccctaacagaacgcaggagatagaaccgataacttcaatggcgcgcatcacctcaccgggtttatcgccaggggccataaagataggatccagaccggggatcagttcccagccaagcaggaatttcactaccgcagcggcaagaccgagggtgatcaatgcaacgaggaatttggcgaagatctggaagccgttgatcattttttccgggatgaatttcagccccagcgccaccagaatcgcaacaatgatcaccgggatcatgttcatcaggatcagggcgaaagtgaattccaccggctggccgttgatctgcacaccggagtacatagcaaccagaccaccagcgatacaaccaatcggaatggtcacaatgcccgccagcacgccgagcgccagataacgacggtcagaaggttcgataatgccgagcgccaccggaatggaaaacacaatcgttggccccatcatgctcccgagaattaacccagagtatagccacgcggctacgtcgccgcccgccagctctttggcgaggaagaagccgcccatatcgcacgccagcagtgttccggcgaacatgcttgggttagcgccgagcatttcgtaaaccggaataattaccggcccgagaacgtgagccagtaccggtgccagcgcggtcataccgaccatcgccaggcccagtgcgcccattgccataaagccttcttcgaactgaccgccacttccttcgatacttttaccgaacttaccgaggaaacgagcagaaccgccgaactggctcaggatcctgtctacggcagctatcagcataaagaacatcatgatgtacatgatgatttcgttaattcccatcgcctttactccctgttagttgttatttattggcggatgcggcgtaaacgccttatccgccctacatgtgcaatcccgtaggctggataagacgcggcaagcgtcgcatccggcaattgcaccgcgccactggcggatgcggcgtgaacgccttatccgccctacatgtgcaatcccgtaggctggataagatgcggcaagcgtcgcatccggcatttattgcgccgctgcgtacaggccgacaatctgctccaggctggcggtacgcgggttactgcgcagacaaatatcttccagcgcggcctgcgcccatgcgccgtaatgcgcagatgtcgcaccaacatcgcccagtcgtttaccaatcccaacttccgcaatcagctcacttaccgcgttaatagcgtcacgatcgtcggattttttagttcgcagtgcccgaccaatctgactaaagcgttcacgacaaaccatccggttaaattccatcaccgttggcagcaacatggcgttcgcgagaccgtgcggaatatgcagcgccgcgcccggctgatgcgccatcgcgtggcacaacccaagacccgcactggaaaacgccattcccgccatacaactagccagcaacatgctctcgcgcgcggcaaggtcgtgaccgtagcccaccgctttcggcaggcttttgccaatcatcgcaatggcaccaatcgccagactgtcggtaaacggtgtagcgttcagggcgctgtatgcttcaatggcatgggttaacgcatcaatgccggtcatcgccgtgacatggctcggcacaccttcggtcaatgcggcgtcgaggatcgccacatccggcatcaggctggcatgggctaacacctgcttgcgcccgctcaccgcgtcgataatcaccgttacattggtggtttcagagccggttccggcggtagttggaatggcaatcagcggcaagcgcggttgcagaacgctggtttcactcatctctgccagcgtgctatccgggttcgtcaccagcaacgtcacggctttcgccgcatccagcacgctgccgccgccaaacgcgatcaccccatcacagccactctcacgcaactgcgccacggctgcacacacgtcggtaatgcacggttcgcccaccggacatggccagagcgtcatggcgatacctttaacggtcaggctacgcgtcagcccggcggtcatccctgcctgatgcaaaaagctgtctgccatcacgaacagatgtttcagcccacgcgtttgcgcttgctgtccgcaactgctcacgctgcccggaccgcaaagcgtcaccggtggaacgctaaatgtttttacccgttgcagattcagggtatcgaacgcctgaaagagcgcggtctgcaattcattttgcatatagcccctccgctttctctcgcccactactggcgatcgccagcggggtcataaacaaactgtgctgcggtaaatgcacctgtaacgccgggaattgtttgcgaaacagttccgccacgcccggttgcatacaagagccgcccgccagccataaatcagtaatgccctgcccttcaatatgccgggcgacaatgtccgccattttttcgtacaccggtttcaccgcaggccaaatctcttcaccgtgaccgcgcttgtactgctccgcctcttccaggctaatacggcgatttccggcgagagtcagagagatgtgatgtccgccggtggcttcatccgcgctgtacgtcaccttgccctttttcacgatggcaatgccggtagtgccgccgccgatatccactacaccggcgttgtccagttgcagcagatccgcaactgcggttggctcatccagcacatggctcacttccagtccggcagattccagcacgttgatggaaatacgcgggtccgtacctggaggaaaactagtcgccgcatggctaaaacgacgaccgaattgctgctcgagcgtgtcgagatggcgacgaacaatggtgacagcgccgaagaaatcccagacgatgccgtcgcgaaccacatcggcccagtcgaggcataccgccactggctgaccgtcgcggtcgacaaccatgctcaccacatcgcaggtgcccagatccacccccagccacagcggagattccgtcgcggcgggcgtctggttacacagcgttgccgccgtttgcagacgtggggtgagccattgttcgtcgtgcgccatctgttactccttaaacaatgcgaaacgcatcgactaatacacagcgacgcagacggacaaacgtacgcgcgctggttaccccttcaccggttggcgtggtgatggtcatggtggtccagccttccccgcccagccccagcccggcaatgcacggtccgttcttaacgaaaatgctggtatcaatagcattcgccatctggttcatgttttcgatgttgcggctgtgcattgccgccgtgtggtggcaaccgccttccagtttcaccgctagcgcaatggcatccgccacgttggcgacgcgcacgacgggcaacaccggcatcatcagttcagtcacggcaaacggatgttctgcggtggtttccacaaacagcaggcgcgtttcttgcggaactttaaggccgattgccgccgcgattttgcctgcgtcgcgaccaacccagtcacggctgacggtgccttttccgcgctcgtcgatatttttcagcaacaccggttgcagctgctgcgcctgttctgcggtcagtttcaccgcgtgctggccttccatcagacgcatcagttcatcggctacgctatcaacaacaatcagtaccttttcgtcggcacaaatgatgttgttatcgaaagaagcgcctttgacgatggactgagcggcacgggcgaggtcggcggtttcatccaccactaccggcgggttgccagcgcctgcggcaatcagacgtttattggtgtgtttacgcgccgcttctactaccgcttcgccgccggttaccaccagcaggccgatacccggaaacttgaacaagcgttgcgcggtttcgatatccggatttgccacagtaaccagtaagttttccggcccacctgcggcaacaatcgcctggttgagcagcgtaatcgcccgctgggagacttttttcgccgccggatgcggggcaaaaatgacgctgttgcccgcggcaatcaggctgatggcgttgttaattacggttgccgccgggttagtggaaggcgtcacgctagccaccacgccccagggtgcgttttcaattagggtcaggccgttgtcgccagtcagcacttgcggagagaggcactcaacgcctggtgtgccgcgcgcctgagcgacgttttttgcaaatttatcttcaacgcgccccatgccggtttcactgacggcaagttccgctaaatctctggcgtgtttttcgcctgcttcacgaatggcagcaatggctaactggcgcattgccacgctttttaacccttgctgggcgactttggctgccgcaacggcgtcatccagggacgcgaaaacgcccatctcatgaacggcggcggacggcgtgtcactgctttgcattttcagcagtaccgctttcaccacctgttcaatatcctgttgattcatgatgttctgccttatttgtggaaaattacctgaccgccagacaccacctcatcgacaatgccaatcacgcacagatcgaccggactcgtttcgcttttatgcgcctggcgggcggaactgccactcaccagtaacacccactccccggttcccgcgccaatattgtcgatggcgacggcgcattgcccgtcaggattaccttgtggatcaatcatttccaccatcagcaatttgtcatgcgccagtccgtgatggcgtacggtacaaacaatttgtccagtgacgactgccagtttcatacccgcctccgtggcgtatttcaggtaaaagctccccctaccctccgcagaaggtaaaatgaaaaaggagagagcgtgacgcccgaatcgacgtcacacagggtgattacaggttgctgctatcgcctttcaggccgatcgggaagacttcttccaggtcgccgtgcggacgcgggataacgtgtacagataccagctcgccgatacgctgtgccgctgcggcacctgcatcggtcgcggctttacaggctgcaacatcaccacgaaccatggcagtacacaggccgccgccaatctgcttaacaccaaccagcttgacgcgcgcagctttcaccatcgcgtcagaagcctcaatcagtgcaaccaggccccgggtttcgatcattcctaatgcttccattgtgctttcctctttatcagggtccagaacgggaccgttcattcaaccagtgtttgtaaactgctttcgcggttcacttctgtctgacgcggcacagctgccaccagcgccagctcgataatttcctgcacgctacaaccacgagagagatcgtgcatcggcgcggcaagtccttgtatcagtggcccgacggcacgatatccgccgagtcgttgtgcgattttgtaaccaatatttccggcttccaggctcggaaaaaccatcacattggccttgccctgtagcgggctggcaggcgctttttgcgccgccacttccggcacgaaggcggcgtcaaactgtaactcgccatccaccaccagctttggtgcgcgctcacggacgatttctgtcgcctgctggacgttagcaacacaggggtgacgggcgctaccattgctggaaaagctcagcatcgccacgcgcggctcttctccggtgatggcgcgccaggtttcggcactggcaagcgcgatatccgccagctgcgccgccgtcggctgtggcaccacgctgcaatcggcaaagcccaacgccgggccgctgtactgtggcaacatcaggaaaatggaagagagcgttttacagcctggctgcaagccgataatgcgtaatccggcacgcagcacatttgccgtggaagagaggttgcccgcgatacagacatccgctttaccggcgctgaccattgctgcggcgaacatcagagggtcggtaagtttttccagcgcatccggcggcgttttttcgcccgcgcgggccagccagcgatgagcaaattcttcccgcattgcgaggttgccatgcggatcaatcacctgtagcccgtccatcgccacgccgtgactgagcgcaaactgacgaagttcaaacggattggcgaccagaatgggcgttgccagaccttgttgatgtaaatattgcgcggctttcagcacacgttggtctaacgcatccggaaaaaccactctggcgggcgctcgcaacgccagttcacgacaacgttcaataatcattgcgtttcccccagtcgttgttggatctgcttcaccgttagcggctgcttcgttacgctcaggatcatcatcacgtagaccgtgctgctaaggcggttcagcgcctgcaaaatgtccgggcgtaatacttcaaagctgcgggtgataaagacctgcgccgctacggtttcggtttcccgcactttggtgcgtagcagattgagcaacgcagcatcgcgcccgtggctggcttccggcaccagatgatcgtggtcgagatagcgcagcggctgatgagaaagccgatgcagatcttcgtcagaaagcccgacaatcgcctggcagcccagcggttcccccagcgcatcggcgcgcataatgttgccaagacggctacggatatccgccagccacggctgccacggttccgccagttcaatttgcagccacactgccagcgcaatggtgctgtcgagaaccgcgcgaaaacccagacgcggatcgcttttggcgaccattttttccgcgctcaggtgagtcagcgtatccggcttttttgccaccggctggcgacacagttcgcagcacgcctgcggatgttcatcgctactggtcagcccatgaacgggctgcggctgctgctgttcatcgtcaacaaacaggcggccctgctcgtcaataaacttgatgcgcagatggcggctttccagcaactcccgggcagagggcgtcaggcgactgtccgcagggagatggatctctgcgccttcgctgagcgtatggttcgctcttagccatgcttcggtgatgaaatctttcatagggattgccagttagccggccaggcgacatacaggaatttcacgctggatgtcgtaccaaattcgatgctggagcctttcgggataaacatcacgtcgcctgctttggcgatcatggtttggccttcgtggcgaacatgcagctccccttccagcaccatgtcgatttcgtcgtagttcagggtccacgggaagaatgcgttctcccactgcataaaaccggcggccatgctgctgccgtcgtctccggtcacaagatcagtcaagcccacgcaatgcggctctgcgccgtcgaaacgaccaaacttgacgctactgccatcaatcactttgatgccgcctttgccggtcacgcttttgaagctcggctgcattgcgccctgctccaggctctgtttttccttcatcactttttccatcagctgtgcgaccaggctttcggtaaactggccttccggcagctgggcaatgatggtttcgcggatgcgctggctttcggttttgtcggctggcacgctggcgggcacggacgccgttaccgggatgctttcatcacattcggtgatggtaaaacccagtagatccgccacttcacgggcttccggggtaataatgctggcgcgcagaaccacggacattgcctgttcgccgcgcgcgtgtgcttcacgaatatcattcgctgtgatgagttttttcacctgcttcctcctgtttggtgagagatgccagataatccaccagttgctgcacgctttgcgggtcgtggctgtttagctcgaacatcggctcttcgaaacccgtctcaagcaataactttcgcgttgcggcgacgtcagcatctggcatgtccgttttactgatgacggcgatttgccgtttgctgacgccaatatccagcaacccggcaggcaaccgactttccgggtcatttgcgccatggacatagatcagcatgtctacatcctgtagcgtggtaattaaggcgtgataccagcggggatggttaaaatattcacccggcgtatcaatatcgcccttatcattaaattccacggcctgtgtttttctggcgagggtataattcccctgcaacgcattaaataacgttgtttttcctgccccgacgctacccacaaacgcaattcgtttcatgaatgcctcgtattaacttttggtcatttcacaaagcgtataatttaataagcgacctaaaccgctgacggtttgacttaacgcttcttctactgcgcccacgctgccataaatcaccaatgcaccgctgaatcggtcgagaaaaccgatatgcacatcagcggctttcagcgctaaatcaccggcgatcatcgccgtttcgccgggagttagcgtcataatgccaattgcgcccgcatccggaacgccgattttcttcgccagttcctcaccgggatgcgcgatgagatgcgccagtgtgacctgtttgccgggcacaaattcctgaatgatgcgttctttatccatgagtcgccgcctgtgaaaaactttcgtgtatcgtgacaatttttcgtcagagtaaataacaaaattcggcaagcgcgtttaaaaggtgaggtagatcactaagaatggagagatattcgctgtggtgcataaactttcatatgcaacgcatgaatataaataaaataatatcgagatattatatagactgcttttttttattattcgcaaactcagtaataagctttactaatatattgcagctaaactgcttaccctgaatattcagggtaagcgtgagagttaaaaaaaattacagcggttgggtttgcgcttctaccacggccagcgccaccatgttgacgatacgacgcacgcttgcgatcggcgttaacacgtgaaccggtttcgccacacccatcagcaccgggccgacagtcacaccttcgctgctggaaacacgcagtaagttgtaactaatgcgggcagcttccatgttcggcatcaccagaatattggcggaacctttcaaagagctgtccggcatacggtcgttgcgaatcgcttccaccagcgctgcatcgccgtgcatttcaccatcaatcatcagttctggtgcacgttccctgaccagttccagcgcctgacgcattttgctgctgctcgggcagtcagaagaaccaaagttggagtggctcaacaaagcaacgcgcggctcaataccaaaacgacggacagtttctgccgccatcaaggtgatctccgccagctcttctgcatccggttcatcattaacatatgtatcggcaataaaggtgttaccactcggcagcagcagcgcgttcatggcacctgcggtgtgaacgccatcgcgataaccaaagacatttttcaccacgctaaaatgttcatgataatcacccaccgtaccgcaaatcattgcatcggcttccccacgctgaaccatgatcgcgccgatcactgtcgggttactgatcagcgcccgctgcgcctgttcctgagtgacgccgcgacgcttcatgatctggaagtattcggtccagtactctttaaagcgcggatcggattcgttattgacgatctcaaaatcaacgcccgctttgatctgcaagcccagtttctgaatgcgcatttcgatcacgttcggacgaccgataaggatcggtttcgccagtcccagcgttaccagttcctgagtggcatgcagaacgcgcgcctcttccccttccggcagaacaacgcgcttcggcgctttgcgagcctgggagaaaatcggcttcataaacaggttggttttgtaaacgaactcagtcagcttgtcgatgtagacgtcgaaatcagcaatcggacgagtcgccacgccgctctccatcgcggctttagcgaccgcaggagcgatcttaacgatcaagcgcggatcaaacggctttggaatgatgtattccggaccaaagctcagatcctgatcgccatacgcactagccaccacttcgctctgttccgcatgggcgagttctgcaatcgcacgtaccgccgccagtttcatctcttcgttgatggcggttgcgccaacgtccagcgcgccacggaagatgaacgggaagcacaggacgttgttcacctggttcggatagtcagaacgaccggtgcaaatgatggcatccggacgcacttctttcgccagcggcggcagaatttccggttccgggttcgccagcgccaggatcattggcgcacgagccattttcttcaccatttcctgggtcagcactttcgggccggaacagcccaggaaaatatccgcgccttcaatcacatcatcgagggtacgtttgccgtcatccaccaccgcatatgcggctttggtttccgccatgtttggctcacggccctgatagataacgcctttactatcgcaaaccacgatgttatgtttttgcagacccagcgctaccagcaggttcatacaggcgattgctgcggcacccgcgccggaaaccaccatccgcacgtcggagatgtttttctccaccacgcgcaagccgttgaggatggcggcagtgctgataattgccgtgccgtgctgatcgtcgtggaataccggaatattcatccgctcgcgcagtttctgttcaatatagaaacattctggcgctttaatgtcttcgaggttgatgccgccgaaggttggttcgagcgcggcgacaacttcaataaatttgtccgggtcgagttcgtcaacttcaatgtcaaatacatcaatcccggcgaatttcttaaacagaacgcccttgccttccatcaccggtttgcctgccagcgcgccaatgttgcctaaccccagcaccgccgtaccgttagagatcaccgccaccaggttacctcgggcggtatatttgtaggcttttaacgggtctttttcgatttcaagacaaggtgcggcaacgcctggactgtaggccagcgccagatcgcgctgtgttgccagaggcttggttggagaaacctggattttccctggaactggaaattcatggaaatcaagtgcactttgttttaactggtcatccatttggttgttcctttcacgtaacgttcacaaataaagtgtgtgggcaacagcccctgcccacaacgtggcgcacattattaccctgccggagtctacagactttgagcaagtccaaactctcaccattaatataatgttttggtaataatcctataacactgatgttacctgcttaatccagcaataccatgcctgtctgctatgcttttttgatgcgtttagcgaaatttctcagaagtgtgaattaacgcactcatctaacactttacttttcaaggagtatttcctatgaacgagttagacggcatcaaacagttcaccactgtcgtggcagacagcggcgatattgagtccattcgccattatcatccccaggatgccaccaccaatcctagcctgttactcaaagctgccggattaagtcaatatgagcatttaatagacgatgctatcgcctggggtaaaaaaaatggcaagacccaggaacaacaggtggtcgcagcgtgtgacaaactggcggtcaatttcggtgctgaaatcctcaaaatcgtacccggtcgcgtgagtacagaagttgatgcacgcctctcttttgataaagaaaagagtattgagaaggcgcgccatctggtggacttgtatcagcaacaaggcgttgagaaaagtcgcattctgatcaagctggctagcacctgggaaggaattcgcgcggcagaagagctggaaaaagaaggtattaactgcaacctgacgctgctgttttcttttgcacaggcacgggcctgtgcggaagcaggcgtttttctgattagcccgtttgtcgggcgtatttatgactggtatcaggcacgcaagccgatggacccgtatgtggtggaagaagatccgggcgttaaaagcgtgcgcaatatctacgactactataagcaacaccactatgaaaccattgtgatgggcgcgagcttccgtcgcaccgaacaaatcctcgccttaaccggctgcgatcgactgactatcgcaccgaatttactgaaggagctgcaggaaaaagttagcccagtggtacgtaaattaatcccaccttctcagacgttcccacgcccagctcccatgagcgaagcggagttccgttgggagcacaatcaggatgcgatggcggtagaaaaactgtctgaaggcattcgtctgttcgccgttgatcaacgcaaactggaagatcttcttgccgccaaactataaaccagccacggagtgttatatgtcccgaaaagaccttgccaatgcgattcgcgcactcagtatggatgcggtacaaaaagccaactctggtcatcccggcgcgccgatgggcatggctgatattgccgaagtgctgtggaacgattttcttaaacataaccctaccgacccaacctggtatgatcgcgaccgctttattctttccaacggtcacgcgagcatgctgctctacagtttgctacatctgaccggttacgacctgccgctggaagaactgaagaacttccgtcagttgcatagcaaaaccccaggccacccggagattggctatacgccaggcgttgaaaccaccaccggcccgcttggacaaggtttggcgaacgccgtcgggctggcgatagcagagcgtacactggcggcgcagtttaaccagccagaccatgagatcgtcgatcacttcacctatgtgtttatgggcgacggctgcctgatggaaggtatttcccacgaagtctgtagcctggcaggcacgctgggactgggcaagctgattggtttttacgatcacaacggtatttccatcgacggtgaaacagaaggctggtttaccgacgatacggcaaaacgttttgaagcctatcactggcatgtgatccatgaaatcgacggtcacgatccgcaggcggtgaaggaagcgatccttgaagcgcaaagcgtgaaagataagccgagcctgattatctgccgtacggtgattggctttggtagcccgaataaagcaggtaaggaagaggcgcacggcgcaccactgggggaagaagaagtggcgctggcacggcaaaaactgggctggcaccatccgccatttgagatccctaaagagatttatcacgcctgggatgcccgtgaaaaaggcgaaaaagcgcagcagagctggaatgagaagtttgccgcctataaaaaggctcatccgcaactggcagaagagtttacccgacggatgagcggtggtttaccgaaggactgggagaaaacgactcagaaatatatcaatgagttacaggcaaatccggcgaaaatcgctacccgtaaggctagccaaaatacgcttaacgcttacgggccgatgctgcctgagttgctcggcggtagcgcggatctggctcccagcaacctgaccatctggaaaggttctgttagcctgaaggaagatccagcgggcaactacattcactacggggtgcgtgaatttggcatgaccgctatcgccaacggcatcgcgcaccacggcggctttgtgccgtataccgcgacgttcctgatgtttgttgaatacgcccgtaacgccgcgcggatggcggcactgatgaaagcgcggcagattatggtttatacccacgacagtattggcctgggcgaagatggtccgacgcaccaggctgttgagcaactggccagcctgcgcttaacgccaaatttcagcacctggcgaccgtgcgatcaggtggaagcggcggtgggctggaagctggcggttgagcgccacaacggaccgacggcactgatcctcagtaggcagaatctggcccaggtggaacgtacgccggatcaggttaaagagattgctcgtggcggttatgtgctgaaagacagcggcggtaagccagatattattctgattgccaccggtagtgagatggaaattaccctgcaagcggcagagaaattagcaggagaaggtcgcaatgtacgcgtagtttccctgcccagcaccgatattttcgacgcccaggatgaggaatatcgggagagcgtgttgccttctaacgttgcggctcgcgtggcggtggaagcaggtattgccgattactggtacaagtatgttggtctgaaaggggcaattgtcgggatgacgggttacggggaatctgctccggcggataagctgttcccgttctttggctttaccgccgagaatattgtggcaaaagcgcataaggtgctgggagtgaaaggtgcctgatggtgattgccggatgctgattgccggatgcgacgctgacgcgtcttatccggcctacagcgtcttatccggcctacatgtcccgccattttgtttaacgggtgatccacaacgtgggccaggcgtctggcccatgccagttatcgcaggtgggttctgcggcgtaacgcaccaggcgaaaacgctgaccgtcaaagcgccagcgcgcctgaatgccacaatcgcttaatccgcgccctttcgctaaggtcaccagttcacggcttttctcatcaaatgttgcgttcatcagttccagttcattcgtctcctgaccgttgttgaacggcaaacgcaaccgaaccgggcggctagctagtggctttttacggctcacaatccatgccaaatcaatggtgttataggcccctgcctcacagctaatcatcatcagcgctttatcatcagtcagcgcagtgacattcacctcacgacgcaatggatcaaggctgcagcgcagaccattcatccgccagtttccataatccagcaaatcgttgcgttcttcgagactgagtggcgtcggcgttgggttaaccaccgcgacctctttcagcgcaggcgcgggcggtacgctgagcggcggttcgtcccctttcttgatccacgcggtttcactgccaacgcgcttttgctgagcatcaataaacaacaacgctgcttttaagccactcagagaaatggtctgatcgccatcgcgtaaggtgattgccttcccttcctgaatcatctgcaaaaacgcggtgatggttgccgtatcatcggttactaataaccatggactaatccgccacttgtcaccacttaacgccaacggctcgccatctaacagcagccgtggcgctatctccccttcactcgcctccgggctcttcaatccgccgcgctcaatacgtaaaacggcatcggtatgcgccccggcgctgcggctcagggtcatcaccagtccattatgatcgcccgtattacgcgccacgcagaaattttggttattacaggtgacctgccagtcggaaaacgcccgttgcgctggtgccgcccacaccaaagacgtcggcaacaaagcgaaaaaaaagagaaggaaaatgcgatagcgcatggacggtacgaccccagaagttcaaacaaacagcacaagtcgtatcttcgttgcgcaggtagcgcggctcaatcggatttgtcggattgagccaataataaacaacgaaatattattgttatttttcagtccattaaatgactcgtttgcaaatagttaagcaataacaccgtcttaccgtcacgtatctcgccggttttgatcatctccagcgcctggctgaacggcagctcgagcacttcaatatcttcatcttcgacaccgccaccggcgttagcgcgctgattgtcactgtattcggcgataaaaaagtggattagctcagtcacaccgcctgggctcatatacagttcaaataatttgcgcacttcacccacttcatagcccgtctcttcaatcgcttctttgcgaatacacacttccggttcgtcgttatccagcagcccggcgcagctttcaatcagctgcccgctttcattgccattaacccaggtagcgacacggaactgacgaatcagaaccacggtctttttcttcgtgttgtacaggaggatcgtcgcaccattgccgcgatcgtacacttcacgtttatggcggataacttcgccgtctttgcgcgtgagatcgtaagtaatgttgtgcagggtgaaatagttatcggagagaattttgtctttaatgagggtgatttgttgcgtcataccgactccacagcgcgaaatgaacaattatcttacgctgtgaagtcgggtttgtctgcgcaggctatcagtgagatttgacactttttacccccagccagtcaataatcccctgtgccgcatgacgtccttctgccattgcggtaaccaccagatccgcaccacgcacggcgtcaccaccagcgaagattttcggattggtggtctggtaacggtactggctttccacatccgcgatgatgcggccccatttgtctaccgttacaccgtggctctccagccacggcatcccgtgcggattgaagccaaacgccataatcaccgcgtcggctggcatgacaaattcactgccttccaccggcactggacgccgacgcccctgggcatccggctctccaagacgcgtgcgcaggaaacgaatcccgcagacgtgaccttgttcattcagctcaagcgccaccggctggacgttaaattcgaagttggccccctcttcgcgggcgttcttcacttctttcttgctgcctggcatgttagcttcatcacgacgataagcgcaggtgacgttactcgcgccgtggcgcagtgcggtacgcacacagtccatcgcggtgtcgccgccgcccagtaccacgacgttaagtccggcggtattgataaacggctcttccggtagctcttcgagccccatcacctgtttagtgttggcaatgaggaacggcagcgcgtcataaacgcccggcgcatcttcattgggtaaacccgctttcatggaacggtaagtgcctacgccaacgaagaccgcgtcgtattgttccaaaaggctatccaaagagacatctttacccacttcacaattgagttcgaagtgaatccccatcgcgctgaagatttcccgacggcgtgccagcagggatttatccagtttgaaagaaggaatgccgaaagtgagcaagccaccgatttctggatggcgatcgtacaccgtcacccccacgccattgcgggtcagaacatccgcacaggccagccctgccggacctgcaccgataatcgccacccgcttgtccactttggtgacatggcttaagtcaggacgccaacctttcgccaacgcctgatcactaatgtagcgttcaatgttgccgatagttaccgcgccgtgctcatcgcgaatagtacaggcaccttcacacaaacggtcttgcggacaaacgcgtccggtaatttccggcagggtgttggtctggtgagaaagctcgacggcggcgtcgatgtttccggctttcaccagttcaatccactgcggtatatggttatgcagcgggcaggtccattcacaaacgctgtgctcgccgcacttaaggcagcggctggcttcccgttgtgcctggtcggcgcgaaatggcagataaatttcatcaaaaccggttttgcgcgcttcaatcgccagtttatccggctcgccacgcgcgggcgttgcctgcatttgttcgactttactcattaccggcatttcttgcgccgcggtactggcatgccacggttgatgttcctgacgcgcggtgcgcaagcggcgggatttcgccatgccggagagtgcgacgtcagtgaccagttgcagcgcgtccgccgggcaattctcaacacaggcaggaccgttttcgcgccccgcacaaaggtcgcatttatgcgccgtggcttttacttttcctgccgcgacgggtgtcaggacgatttgcatcgtaccaaaaggacaggccaccacgcaggatttacagccaatacacttttgctgattgacctgaatgctgtcatcaacgtggctgattgcgccattagggcagctacgggcgcagggcgcatcttcacaatggtgacaggtcactgcactacgttgctgttgatgtttgataaccgtaattcggggatgaaaatggtgttggctcaggacatgttgctcatcattgtgagccatgacacaggcgatttcacaagcatgacaacccagacattgctgactgttggccataataaaacgattcataacgaccttcttttttggttgtaaaaaccttattctttatatgagtgttgttattacccgacttacaggggaatcggcaatgttcatgtgcccagaataagtaactatttcgctataaactgtggcagatcaaataatcccatcactgactaaattgcgtttcagcgaactggaacattaatgattttttgtggagaagacgcgtgtgattgttaaacgacccgtcagcgccagtctggcccgggcctttttttacattgtgctgctgagcattctttccacgggtatcgctctgctaactctggcgagcagtttgcgcgacgctgaggctatcaatattgccggaagcctgcgtatgcagagttaccgcctgggctacgacttgcaaagtggcagtccacaactcaatgcacatcgccagttatttcagcaggcactgcatagtccggtattaaccaacctcaacgtctggtatgtgccagaagcagtaaaaactcgctatgcgcatctgaatgccaactggctggagatgaataatcggctcagcaagggcgatttgccgtggtatcaggccaatattaataattatgttaatcagatagacctgttcgtactggctttacagcactacgctgaacgcaaaatgctgctggtggtggcgatttccctggctggcggcatcggtattttcacgctggtcttttttactttgcgccgcatacgccatcaggtggttgccccgctgaatcagctggttaccgccagtcagcgtattgaacacgggcagttcgacagcccgccgctggataccaacctgccgaatgagcttggtctgcttgcaaaaacctttaaccagatgagcagcgagctgcataaattgtaccgtagcctggaagcgagtgtagaagaaaagacccgcgatctccacgaggccaagcgtcgtctggaggtgttgtatcagtgtagccaggcgctgaacactagccagattgatgtgcattgtttccgccatattttgcagattgttcgcgacaatgaagcggctgaatatctggagttaaatgtcggtgaaaactggcggattagcgaagggcaaccaaacccggaattgccgatgcagattttaccggtgacaatgcaagagacggtttacggcgaactgcactggcaaaatagtcacgttagtagtagtgaaccgctgcttaacagcgttagcagcatgctgggacgcggtttgtactttaatcaggcgcagaagcattttcagcaattattgttgatggaagaacgtgcgaccatcgcccgcgaattgcacgacagcctggctcaggtactttcttacttacgtatccagttgacgttactgaagcgtagcataccggaagataacgccaccgcacaaagtatcatggccgatttttcccaggcgttgaatgatgcttatcggcagttacgcgagctgttgactactttccgcctgacgctgcagcaggcggatctcccctccgcattgagggaaatgctggatacgttacaaaatcaaaccagcgccaaactgaccctcgactgccgtctgccaaccctggcactggatgcgcaaatgcaggtgcatttgttgcaaattattcgcgaagcggtgctgaatgcgatgaagcacgccaacgccagcgaaatcgccgtcagttgcgtcaccgcgccggacggcaatcacacggtttatatccgtgataacgggattggtatcggtgaaccgaaagaacccgaaggtcattatggtctgaatatcatgcgcgaacgcgcggaacggctaggtgggacgctgacttttagtcaaccttccggcggcggcacgttagtgagtattagctttcgctctgcggagggtgaggaaagtcagttaatgtaatgcctcctactgaccaaagaatacttgcacttaaggttcagtataaaagggcatgataatttacattaactcctttttttctccacgattggctcgtaccttgccgctacagtgaagcaagtcaagcctacaacgatacgcagaaacacgaggtcctcttttaatggcgaatttctttattgatcgccccatttttgcctgggtgctggcaatcctgttgtgtctgacaggtaccctggcgatttttagtttgcccgttgaacaataccccgatctcgcgccaccgaatgtgcgagtgaccgctaactatcccggcgcaagcgcccagacgctggaaaacaccgtgacccaggttatcgagcaaaatatgaccggcctcgataatctcatgtatatgagttctcagagcagtggcaccggtcaggcatctgtcactttaagttttaaagcaggcaccgatccggacgaagccgtgcagcaagtacaaaaccagctgcaaagtgccatgcgaaagttaccgcaggcggtgcaaaatcagggcgtgacggtgcgtaaaaccggcgataccaacattctgaccattgccttcgtctctaccgatggtagcatggataaacaggatattgctgattatgttgccagtaatattcaggacccgttaagccgcgtgaatggcgtcggggatatcgatgcctatggtagccaatattccatgcgtatctggctggacccggcgaaactcaacagtttccagatgacggctaaagatgtcactgatgccattgagagtcagaacgcgcagattgcggttgggcaacttggtggtacaccttccgtcgataagcaggcgctcaacgccaccattaacgcccagagtctgctgcaaacaccagaacagttccgcgatatcaccttgcgggtcaatcaggacggcagtgaggtaaggctgggcgatgtcgccaccgtcgaaatgggggcggagaaatacgattatcttagccgcttcaatggtaagccagcctccgggctgggggtaaaactggcctccggcgctaacgaaatggcgacagcggagctggtgctcaatcgtctcgacgagctggcgcagtatttcccgcatggactggaatacaaggtggcgtatgaaaccaccagctttgttaaagcctccattgaagacgtggtgaaaacgctgctggaagctatcgctctggttttcctcgttatgtatctgttcctgcaaaacttccgcgccacgctgatacccactatcgccgtgccggtggtgttgatgggaaccttctccgtactttacgccttcggttacagcgtcaacaccttaaccatgttcgcgatggtgctggcgatcggtctgctggtggatgacgccatcgtggtggtggaaaacgtcgaacgtattatgagtgaggaaggactcactcctcgcgaagccacacgtaaaagcatggggcagatccagggggcactggtcgggattgcgatggttcttagcgcggtatttgtaccaatggccttcttcggcggcaccaccggtgccatctatcgccagttctctattaccattgttgcggcgatggtgctgagtgtactggtagcgatgatcctcactccggctctgtgtgccacactacttaagccactgaaaaaaggtgagcatcatgggcaaaaaggcttttttgcctggtttaaccagatgtttaaccgcaacgccgaacgctacgaaaaaggggtggcgaaaattctccaccgtagcctgcgctggattgtgatttatgtcctgctgcttggcggcatggtgttcctgttcctgcgtttgccgacgagcttcttaccgctggaagaccgtggcatgtttactaccagcgtacagttgcccagcggtagtacgcaacaacagaccctgaaagtcgttgagcaaatcgagaaatactacttcacccatgaaaaagacaacatcatgagcgtgtttgccaccgttggttctggccctgggggtaacgggcaaaacgtggcgcgaatgtttatccgcctgaaagactggagcgaacgcgacagtaagaccggcaccagctttgccattatcgagcgtgcaacgaaggcgtttaaccaaattaaagaagctcgcgttatcgccagcagcccgccagcaattagcggtcttggtagttctgcaggttttgatatggagttgcaggaccacgctggagcgggtcacgatgcgctgatggcagcacgtaatcagttgctggcgctggcggcggaaaacccggagctaacccgtgtgcgccataacggcctcgacgacagtccgcagttgcagattgatatcgaccagcgtaaagctcaggcgctgggcgttgctatcgacgatattaacgacacactgcaaaccgcctggggtagcagctatgtgaatgactttatggatcgcggtcgcgtgaagaaagtctatgtgcaggcagctgcgccgtatcgcatgctgccagatgacatcaatctctggtatgtccgaaataaagatggcggcatggtgcccttctctgctttcgcgaccagtcgctgggaaacaggcagcccgcgtctggaacgctataacggttattctgcggttgagattgttggggaagccgcaccgggggtcagtaccggtacggcgatggatattatggaaagcttagtgaagcagctgccaaacggctttggtctggagtggacggcgatgagctatcaggagcggctttccggcgcgcaggctccggcgctgtacgccatttccttgctggtggtattcctgtgtctggctgcgttgtatgaaagctggagcgtgccgttcagcgtaatgctggtcgtgccgctgggggtaatcggcgcgctgctggcaacctggatgcgcgggctggaaaacgacgtttacttccaggtgggcctgttaacggtcattggtttaagcgcgaaaaacgccatcctgatcgtcgagtttgctaacgagatgaaccaaaaaggccacgacctgtttgaagcgacgctccacgcctgccgtcagcgtttacgcccgattctgatgaccagcctggcatttatcttcggcgtattgccaatggcaaccagcacgggtgccggttccggtggtcagcatgcggtgggtactggcgtaatgggcgggatgattagcgccactattctggctatttacttcgtgccgctgttctttgtgctggtgcgccgccgcttcccgctgaagccgcgcccggaataagcaataaaaaaggcgacatgccaatgtgtcgcctttttcaactttccgattaagaacctgctcagcgggttcttgctgtttgtactttgtctcaggaattacttacgaagcataacttcgataaagtctttccagttccccagttcacgttcaatcataacaacctctcttataattatgggtattctacggaaacaatataccgtggtgaagctaatttactcgattgctgcgatgactacctccgggggacaaatcttatgtaaatactatggtcctgcggtgatgatttgtatgtgatacacagcaacatttcgagatattcatacggcatctaatactgatttaattctggttaaaatacagacagataacaagatgaatattcttaatgtttacgttaaaaatgtttaatattatttaatagttgttaatttgaatacttcgataatgttatatttcctgataatcatttgcaggcaaaatgttttcacccttaaatgagtatttattctcataaatcgaaaaaggattcattatggttacactttacggtatcaaaaattgtgacaccattaaaaaggctcgccgttggctggaagccaataacatcgactatcgttttcatgattaccgcgtcgatgggctggacagcgaattattgaacgattttatcaacgaattaggctgggaagcgttactcaacacccgtggtacaacctggcgtaaactggacgaaaccacccgcaataaaatcaccgatgcggcctctgcggcggcattaatgactgaaatgcctgcaattatcaaacgtccattgctctgcgtgcccggtaagcctatgctgctgggtttcagtgattccagttatcagcaatttttccatgaggtgtaatctatgagctgcccggttattgagctgacacaacagcttattcgccgcccttccctgagtcctgatgatgcaggatgccaggctttgttgattgaacgtttgcaggcgatcggttttaccgttgaacgcatggactttgccgatacgcagaatttttgggcatggcgtgggcagggtgaaacgttagcctttgccgggcataccgacgtggtgccgcctggcgacgccgatcgttggatcaatcccccgtttgaacccaccattcgtgacggcatgttattcgggcgcggtgcggcagatatgaaaggcagcctggcggcgatggtggtggcggcagaacgttttgtcgcacaacatcccaaccatacggggcgactggcatttctgatcacctctgatgaagaagccagtgcccacaacggtacggtaaaagtcgtcgaagcgttaatggcacgtaatgagcgtctcgattactgcctggttggcgaaccgagcagtatcgaagtggtaggtgatgtggtgaaaaatggtcgtcgcggaagtttaacctgcaaccttaccattcatggcgttcaggggcatgttgcctacccacatctggctgacaatccggtacatcgcgcagcacctttccttaatgaattagtggctattgagtgggatcagggcaatgaattcttcccggcgaccagtatgcagattgccaatattcaggcgggaacgggcagtaacaacgttattccgggtgaactgtttgtgcagtttaacttccgcttcagcaccgaactgactgatgagatgatcaaagcgcaggtgcttgccctgcttgaaaaacatcaactgcgctatacggtggattggtggctttccgggcagccatttttgaccgcgcgcggtaaactggtggatgcggtcgttaacgcggttgagcactataatgaaattaaaccgcagctactgaccacaggcggaacgtccgacgggcgctttattgcccgcatgggggcgcaggtggtggaactcgggccggtcaatgccactattcataaaattaatgaatgtgtgaacgctgccgacctgcagctacttgcccgtatgtatcaacgtatcatggaacagctcgtcgcctgatgagtggttctgcaagaggaaataagcatggactggctggctaaatattggtggattctggtgattgtctttttggtaggcgtcctgctgaacgtgattaaagatctcaagcgcgtcgaccataagaaatttctcgccaacaagccggagcttcccccgcatcgtgatttcaacgataagtgggacgatgacgacgactggccgaaaaaggatcaaccgaagaagtaagctgagtgctcaaccgtaggccggataaggcgttaacgccgcatccggcaatggtgaacgatgcctgatgcgacgctcacgcgtcttatcaggccaggtaatctgtcttttacatcatttcaatcacatcatcatcgccaggcttaccgccacttagcgcttcgtcgaaataatgtttcggaatggtataacgcaagtgatccagggcaaattgcatactgcgattgtcgatcgcatggcctaaatcctccacgatatccagcgtcacgtcaccaccggcactgattaacgcttcctgcgccgcaaccgcatgcgccagatcgataaccggatcttcaccgccatgaatcaggtgaattgtcgtggctgtagacgcagtttccggcaggctcgcatagcgtccgttaaaagcaatgacgcgactagcaaggcccggttcggctttaatgctctccagcaccataatcgcgccttgagagaaaccgatgagcgccgtggcgttagcccctactccgctctgtttctgccagtagcgcaccgtttcaataaacgtcggcatgatcgcatccacacgcgcctggcgattatcttccgtaataccctgcacgctaaaccactgacgccccgccggattaccgctcggctccgcgccaccgacactcaccaccagcgcatcaggaaacagcggtgcaaaccagttgcctatttcccccattgccaccgggttatccccgacaccgtggaaaagcagtaacaactgttgcgcaggtttatccgggctttgaacaacaaaatggtcatgtttcatggcgaactccttaactgatgtcattaattttacgccgctgactcacaatgaccatgagataaaattgaaggagtcagtgaaataattgccattgcgttatgcgatcgcgcagacgctcagtgcgaacatcattaagtgcgaacagcgcctgcgcggcctcttcccgctgacggaccagtaacatcttgcggccactaagtttaagtgtggtacataactgcgcatcactggcgtttttctgtaaacgcccacgcagcgccggtaatgccagttcactggtttgtaacagacgcaataagcaacctaagctcgttaatagcggacgatgagcgaaagcaaaaccggccagttcaagccagtcgtcgtcagaaaggacggcatcgtttagtggatcaacaggaagcgtttcgccattccactgcgcgagagcttgcgcatcgcgacgtaaacggtaatgctcacgttcagccagctgtttacccgcatcactcatcggtaacagcgccatcgccgtatagcaaccgctgctggcttcccgatgattacccatccgcaccagcacaaaaccgcagcgttgccagaaacgccataactccccggtgtaaccaaaactcacgctaagatagtcgaggtcttgcgtatattgcaaagcaccagcaataagttgccgccctgtgccttcccgctgacgagccggatgaactgctatccggctgacccgccgtccacgcaatgtcgccgccagtggattgttgccgtgcgccgccaggctctgggccaccagattaccccgcgggcgacgaaaacctgcccataccgcctgactgagttgttgagataatccaccctcatccaccagccacagcgccccggcaatctcgttttcgccagccgcctgtaaaaaatgttgccctggtgcatccatcatccggcgtaaatccagcgggctagtccgatagtgcgcaccagacaagagctgataaacctttaacggcgtttctggatcgctttgccataacgtctgttcaaatgcggaaatgacaatattgccttgtggtgtatgggtgaagttttcatcgtcaaaaaccagtgcctcgctgaccattttttccagcgggcatccctgcgcccagcggatcggctgttgcagttcaaaacggtgtaaatgcggaaagcgagcgcaaaatttcagcaaaaaaccacgtccggtgccttcgtagccctgcaccgtagtggttaacaacgttcgaggaaaacggcttaccagttgatgcaacaatggcgcaggtatggctgcggcttcatcgaccaccagccagtcggcttgctcatcgctggctaacaaggcatccggcgcaataaagcgaaacttctcgcccgcaaattgtgccagtacatccgtactcgcttttgcgggcgcggtgacaatcgctctgcccgcaatacgagaaatgagttgccctgccaacgcgctcttaccgcgcccacgcgcagccgttaccgctgccacgcccggcggcatggtcattagctgctttaagagttgctgttgttctggttgtggtgcgccagtcgcggggtaccagtcagtacggggagtaaaatgcgccaagctgaatggctggttttgccgccagaggatagcctcgttatccgccgtaagtacgcgtttgagatgctggacaaaatgcggcgtcgcaatagggtcagggcaatcactccagcgcaggctgtcggcatcaggttggttttcccactcttcccatacagggagtaacaaaaccagccagcttcccgctttcaacgttccgctaagtgcggcaaaggcagcggcatcaaagccgtggcgggcgtcgaataccgcatgccggaactcgcgcccaagtaaagtttgtagtgcgctgggagaacagtggttttcagcatctggccgcgggctaatccacagccagtcgccaggtaaggcatcacgcaacttaagagtatgctcaaaacaccaaccctcttccccgctcaacaccagcaagcggcggatcccttcacgtttcatttgcgctgttaatgtgtgaagcgcagtcagttcagccatccctgccccggaagttaaatgcttttaccaaaagtattgcattgtgccggatcgccgctgtcgaaaccacgtttaaaccagctgtagcgttgctgagaagtgccatgagtgaaactgtctggtactactcgcccctgactttgctgttgtaaacggtcatcgccgatggcctgcgccgcgttcagcgcctcttccagatcgccggtttccagaacgccttgctgctgcatactatgcccccagacaccggcaaaacagtcggcctggagttccatacgcacagataagcggtttacttccgcctgcgtcgcgttttgttgcagttgacgaactttcggctcgatgcctaacagtttctgcacatgatgaccgacttcatgggcgataacgtacccctgggcaaaatcgccatccgcgccaagtttgtctttcatgtcatcatagaaggagagatcgatataaaccgtgccatccgccgggcaatagaacggccccattatggactggcccgccccgcagccggtacgcgtcattccacggtacatgaccagcttcggttgctgataggtcttacccatcttctcgaactgttgtccccaggtgtcttccgtggttgccagaatcacgctggtgaattttgcggcttcgtcttcatttgggctaatactccgcgtactttgttgttgggaaaccggctgcccggtcatcaacccggttaaatcaacaccatagtagcctgcaaccagcacgactatcagtaaaatcagcccgcctttaccgcttggcaggcgaaaaccgggaccgcccatagatggaccaccagagctgttgcgcctgtcttcaacattgtcactttcacgtcgcccttgccaacgcatagatacctcaacaatatattcattatagaaatgatcgtaggtggttcagaggaagattaccacaggaaagcgggatgaaatggcggaggaatgagcgttcaatgcatatattccgagagcggttgtcttgccgtgccagctgcacggcaagatgatgaacagaaaaatcagtccagctgtacacccaggcggcgggcgacggcttcataggcttcgatcaggccaccgaggctctggcggaaacggtctttgtccattttctccagcgtttctttgtcccacaggcggctaccgtccggggagaactcatcacccagtaccacttcgcctttgtacagaccaaattccagcttgaagtcgaccagaatcagaccagcatcatcgaacagttttttcagcacgtcgttcgctttgtaggtcagctctttcatacgcgccaggttctctttgctcacccagccaaaggtttcgcagtaagattcgttgaccatcggatcgtgcatggcgtcgtttttcaggaacagatcgaacagcggcgggttcagctcaataccttcttcgattccaagacgtttcaccagagagccagcagcacggttacgcacgacacactcaaccggcaccatatccagctttttcaccagacattcggtatcggagagcagacgctccatttgagtcgggatacccgcttcagccagtttgctcataatgaagtagttgaacttgttgttcaccatacctttgcgatcaaactgctcaatgcgcgcgccatcccctgcactcgtatcattgcggaattcgagcaccaacaggtccgggttttccgtgctgtatacggttttcgctttaccacgatacaactcagcttgcttttgcatctttatcactcctgggtgtgaattaacgttttaaaatcttttgctgtctggtgtgccggatgttttgtcggatgcggcgtgaacgccttatccgaactacgtccgacaaacaaatttcgtgcgaattaccgctaaaatcgcgttttcctgcagacgcacacgtttgcgtatcatatcagaaaaaagggccggatgattccagccctgtatttttacttgctaaacgcagcctggaagacagctaccagcgcgtcgttctgactctgagtcagagtatgacctttcggatcgatgaactgtaggctgctgcggttatctaaatcgccaacctgcagtttatagtcaccggatgccaggcctggatcgctcgcgcccagttcctgccagtcgctgtcagacagcggcttataagttacggccatgttgccctggctacgggtgctgtcggtcactttcatgcccactttttccagcgccgctggcagacgttgccaaaccacattgaacggcccgcgtacgaccagcattggtaaaccggtgtcatcagctgcactttgtacgtccatagtggtggaggcacgattttgcgcagcgttcgcggcgtcagtggcagatttatccagaccggcggaaataacgttcatcatctccgtgctgtaacgctgcatggaagccgcgtctgcaaccggtttgcccgcctgttccaggttcagcagtttaaccgtaaccgcctgctgataaccctgcggcttaacagagatttgataacgaccacgatactgctcgtcttcgtccagacggttccattgtacccaatcggtggtcagtgtctgaccagcatcatcacgttgggtgatggtgtagtttttcgcctgcagcacgctaaccacctgcggccacagagtattgccacgaccattttccaccagcaaactagcggtatcgcccgtgaactgggtacgcgcgccagaaaccagtgccagcggctgggctggtggacgaatgtccagcgccttaccgacagcaccactaccgttggtcaccgggattgcataatcaccggaggtcaccggcaaaatcattccagccggggcatgaagctccgcaagcggtgccgcttccaggtaggcttcatcaccactgacctgacgcttatagcgactgtcagaactacaggcagcgagtaataaaacaaggctaacacccgcaacctttgccaggcggctcttttgaacagagtaagccatcaaatctccctaaactttacagcaaaccggcatgcttaagcgccgctctgaccgtctcacgaccactgtcggtgattggtgtcattggcaggcgcagcgtatcggtcgccacaagacccagttccttacatgcccatttcaccgggattggattgggttcgacaaatagtttgttgtgtaatggcatcagacgctgattaataacgcgtgcctcggcaaaatgcccttctgctgccagtttgcacatctgggccatatcacgcgctgcgacgttagccgtaacggaaataaccccatgaccgcccaattgcatgaagtccagcgcgctcgcatcatcgccgctcagcagaacaaaatcatcactaaccagctctttgatctggtttacacgcgttaagttccctgttgcctctttgattccgataatattttttactttcgccagacggcccaccgtttccgggagcagatcgcagccagtacgggacggcacattatacagaatttgcggcaggtcagtatgctcagcgatggctttgaaatgctgatacaaaccttcttggctcggacgattgtagtaaggggttaccgtcaggcagccgacgataccactgtcattgaagcgctgcgtcaggctaatggcttccgcagtagcgttagcgccggtcccggcaattaccggaatgcgcccatcagccagatccagcgtcatcatcaccacatcagcatgttcgtcatgatttaaggtagcggactcgccagtggtgccaacagaaacgatcgcgctagtaccgctggcgacatgataatcaatcagttttttcaagctagcccgacagacattacctttttcatccatcggagtaacaatcgcgacaatacttcccgtgaacatgggccatcctctgtgcaaacaagtgtctcaatggtacgtttggtatggcattaaaagcaagcagacagaaccgttctgattgttgtatgcatgttttttttatgctttccttaagaacaactcaccccttaaaggaataaccagtttgacactgagtagccaacattatctggtgatcactgcgttgggtgccgatcgccctggaattgtgaacaccatcacccgtcatgtcagtagttgcggctgtaatattgaagacagtcgcctggcgatgctgggagaagagttcacgtttattatgctgctttccggtagttggaatgccattactctgattgaaagtacgttaccgttgaaaggtgccgaactggatcttttaatcgtgatgaagcgcacgacggcgcgtccgcgtccgccaatgccagcatctgtctgggttcaggtcgatgtggcagactccccgcatttaattgaacgcttcacagcacttttcgacgcgcatcatatgaacattgcggagctggtgagccgcacgcaacctgctgaaaatgaacgggctgcgcagttgcatattcagataaccgcccacagccccgcatctgcggacgcagcaaatattgagcaagcgttcaaagccctatgtacagaactcaatgcacaaggcagtattaacgtcgtcaattattcccaacatgatgaacaggatggagttaagtaatgaatccactgaaagccggtgatatcgcaccgaaatttagcttgccggatcaagacggagaacaagttaatttgaccgacttccagggacagcgtgttctggtttatttctacccgaaagccatgacccccggctgtaccgtacaggcctgcggcttacgcgataacatggatgagttgaaaaaagcgggcgttgatgtgctgggtatcagcaccgataaacccgaaaaactctcccgttttgcggaaaaagagctgcttaactttacgctcctgtctgatgaggaccaccaggtgtgcgaacaattcggcgtctggggtgaaaagtccttcatgggcaaaacctacgatggcattcatcgcatcagcttcctgattgacgctgatggcaaaatcgaacatgtctttgacgatttcaaaaccagcaatcaccacgacgttgtgctgaactggctgaaagaacacgcctgattactttgctccattccgtgctggctgcgcttgcggccagcatacctcacttctcgtgatcaagatcacattctcgctttcccctgcgacacgggtgtcgaatccattttttgctgaacgttaatgaccatcatttttgtaccgttcagaatccagttaatacataacttattgaatatattgagttaatcagaatggcatcctttatgcaatatgaaatgcaatgtttcatatcattttcaaggagccgacatgaaccgctttgtggtggccgaaccactgtggtgtacaggatgtaatacctgtctcgctgcctgtagcgacgtgcataaaacgcaaggtttacagcaacacccgcgcctggccctggcgaagacgagtacaatcactgcccctgtcgtgtgtcatcactgtgaggaagccccttgcctgcaggtctgcccggtcaatgccatctctcagagggatgatgcgatccaactcaacgaaagcctctgtattggctgcaagctttgcgccgtggtctgcccatttggcgcaatcagcgctagtggaagccgtccggtgaatgcccatgcgcaatatgtttttcaggctgaaggcagtctcaaagacggcgaagaaaacgcgccaacacaacatgctttgctgcgctgggaacctggtgtccagaccgtcgcggtgaaatgcgacctgtgtgatttcttgccagaaggtccggcctgcgttcgcgcttgcccgaatcaggcgttacggctgatcaccggtgatagcctgcaacgtcagatgaaagaaaaacagcgccttgccgcaagctggtttgccaatggcggggaggatcccctttccctcactcaggagcaacgctaatggatgccctgcaattattaacctggagcctgattctctatctgtttgctagtctggctagcctgtttttactcggtctggacagactggctattaagctttccggcatcacaagcctggtgggcggcgtgattggcatcatcagcggaattacgcaattacatgctggtgtaactttagtcgcccgttttgcccccccttttgaatttgccgatttaaccctgcgaatggatagcctcagcgcatttatggtgctggttatctccttgctggtggtggtttgttctctctatagtttgacttatatgcgcgaatacgagggcaaaggcgcggcggcgatgggcttctttatgaatattttcatcgcaagcatggttgccctgctggtgatggacaacgctttttggttcatcgtgctgtttgaaatgatgagcctgtcttcctggtttctggtcattgccaggcaggataaaacgagcatcaacgctggcatgctctacttttttatcgcccacgccggaagcgtgctgataatgatcgccttcttgctgatggggcgcgaaagcggcagcctcgattttgccagtttccgcacgcttagtctttctccggggctggcgagcgcggtgttcctgctggcctttttcggttttggcgcgaaagccgggatgatgccgttgcacagctggttgccgcgcgctcaccctgccgcaccaagccacgctagcgcgttgatgtctggcgtaatggtcaaaataggtattttcggcatcctgaaagtagcgatggatctgctggcgcaaacgggtttgcctctgtggtggggcattctggtgatggcgatcggcgcaatctccgcgctcctgggcgtgctatatgcgctggcggaacaggatatcaaacggctgctggcctggagtaccgtcgaaaacgtcggcattattttgctggcagtcggtgtggcgatggtcggtctgagtctgcacgacccgctgctcaccgtggttggactgctcggcgcactgtttcatctgctcaaccatgcgctgttcaaagggctgctatttctcggcgcgggagcgattattagccgtttgcatacccacgacatggaaaaaatgggggcactagcgaaacggatgccgtggacagccgcagcatgcctgattggttgcctcgcgataagcgccattcctccgctgaatggttttatcagcgaatggtacacctggcagagcctgttcagtctaagtcgtgtggaagccgtagcgctacaacttgcgggtcctattgctatggtaatgctggcagtcactggtgggctggcagtaatgtgcttcgtaaaaatgtacggtattactttctgtggtgcgccgcgcagtacacacgctgaagaggcacaggaagtgccaaatacgatgatcgtcgccatgctactgctcgcggcactctgcgtattaattgcgcttagtgccagttggctggcaccgaagataatgcatattgcccatgcgtttaccaatacccctcccgccactgtcgccagcggaatagcacttgtacccggcacgtttcatacacaggtcacccccagtttactgttgctgttactactggcgatgcctttgctgcctggcctttactggctgtggtgtcgtagccgccgcgcagcgtttcgtcgcacaggagatgcctgggcatgcggctacggctgggaaaatgcgatggccccgagtggcaatggcgtgatgcagccgctgcgtgtggtcttttctgcgctatttcgtctacgacaacagctcgaccctacgctgaggctaaataaaggtcttgcgcacgtcaccgccagggctcagagcacagaacccttctgggatgagcgggtgatccgccccatcgtgagcgccacccaacggctggccaaagaaatacagcatctgcaaagcggcgactttcgtctctattgcctgtatgtggtcgccgcactggttgtgctgctaatcgctattgccgtctaaggaaatcaccatgagacaaactctttgcgacggatatctggtcatttttgcgttagcacaggccgtgattctgctgatgctaaccccactttttacgggtatttcccggcagatacgcgcgcgtatgcactcccgccgcgggccggggatctggcaggattatcgcgatatccacaaactgtttaaacgccaggaagttgcgccgacatctagtggtctgatgttccgcctgatgccgtgggtattaatcagcagcatgctggtgctggcgatggccttaccactgtttattaccgtttccccttttgcgggcggcggcgatctgatcacccttatctatcttcttgccctgtttcgttttttctttgctctttccgggctggataccggaagtccgtttgcgggagtcggtgccagtcgcgagttgacgctcggcattctggtcgaaccaatgcttattctcagtctgctggtattggcgctgatagcaggttccacgcatatcgagatgatcagcaatacgctggcgatgggctggaacagcccgctaaccaccgtactggcgttactggcctgtggttttgcctgcttcattgagatgggaaaaattccctttgatgttgctgaagcagaacaggaattacaggaaggcccgctgaccgaatattccggtgccgggctggcgctagcgaaatgggggctggggctgaaacaggtcgtgatggcaagtctgtttgtggccctgtttctgccctttgggcgcgcgcaagaactttctctcgcctgcctgctgactagtcttgtcgttacgctgctcaaggttttgctgatttttgtactggccagtatcgcagaaaacacgctggcacgcgggcgttttttactcattcaccatgtgacctggcttggcttcagccttgctgcgcttgcatgggtcttctggttaaccggtctgtaaggagcactgacggaatatggaaaatcttgctctgacgacgttattgctgccttttatcggcgcactggtcgttagctttagcccacaacgtcgggccgccgaatggggggttttgttcgccgcgctgaccacgctgtgcatgttgagtctgatctccgcgttttatcaggccgataaagttgccgtcacgttgacgttggtcaacgtgggggatgtggcgttgtttggcctggtcattgatcgcgtgagtacgctgattctgtttgtggtggtgtttctcggtttgctggtcacgatctactccacgggttatctgacggataaaaatcgcgaacacccgcataacggcacgaatcgttattacgcatttttactggtgtttatcggcgcgatggcgggactggtactctccagcacgctgctcggtcagttgttgttttttgaaattacaggcggctgctcctgggcgttgatcagttattaccagagcgataaagcgcagcgtagtgcactaaaagcgttacttatcactcatatcggcagcttggggttgtatcttgccgccgccacgctgtttttgcagaccggaacgtttgcgcttagcgcgatgagcgagttacacggcgacgcacgttatctggtttatggcggcatcctgtttgccgcgtgggggaaaagcgcccagctaccgatgcaagcgtggctaccggacgcaatggaagcgccaacaccgatcagcgcctatctccacgccgcaagcatggtgaaagtgggcgtttacatttttgcccgcgctattatcgacggcggcaatatcccgcatgtgattggcggcgttggcatggtcatggcactggtcaccattctttatggctttctgatgtatttgccacagcaggatatgaagcggttgctagcctggagcaccatcactcaacttggctggatgttcttcggcttgagcctctccatcttcggcagccggctggcgctggagggcagcatcgcctacatcgtcaaccacgcgttcgctaaaagcctgtttttccttgtagcaggtgcgctgagttacagctgcggcacgcgcttgttgccgcgtctgcgtggcgtattgcacaccctgccgttgccaggcgtgggtttctgcgtggcagcgctggcgattaccggcgtgccgccgttcaacggcttcttcagtaaattcccgctgtttgctgccggttttgcgttgagtgtggagtactggatcctgctgcccgccatgattcttctgatgattgaaagcgtcgccagtttcgcctggtttattcgctggtttggtcgcgttgtgcctggcaaaccgagcgaggccgtcgccgatgccgcaccgctgccaggaagtatgcgcctggtgttgattgtactgattgtgatgagcctgatttccagcgtaatcgccgcgacctggttgcagtaaggagatgatgaatgaccggttctatgatcgtaaataatctggcgggactgatgatgctgacaagcctgtttgtgattagcgtcaaaagctatcgcctgagttgcggattttacgcctgccagagtctggtgctggtgtctattttcgccactctcagctgcctgttcgccgcagagcaactgctgatctggtccgccagcgcctttatcaccaaagtgctgctggtaccgttaatcatgacttacgctgcacgaaatattccccagaacatcccggaaaaagcgttattcggtccggcaatgatggcactgctcgcggcgttaattgtcctgctttgcgcatttgtcgttcagcccgtgaagctaccgatggctaccgggctgaaaccggcgctggcggtagcgttaggtcattttctgcttggcctgctgtgcattgtcagccagcgcaatatcctgcggcaaatttttggttactgcctgatggaaaacggctcccatctggtgctggcgcttcttgcctggcgagcaccggaactggtggaaataggtatcgctaccgacgccatcttcgccgtcattgtgatggtgttactggcaagaaaaatatggcgtacccacggcacgctggacgtgaacaacttgaccgcgctgaagggataatgagatgagttattctgtgatgttcgctttactcctgctcacgccgctgctttttagcctgctctgttttgcctgccggaaacggagactttctgcgactcgcacggtgaccgtattacatagcttagggatcacactgctgctgattctggcactctgggtggtccaaactgccgctgatgcaggagaaatattcgctgcgggactgtggcttcatattgatggtctgggcggtttgttcctcgccattcttggtgtgattggctttctcaccggtatttacagcattggctacatgcgtcatgaagtggcacacggcgagcttagtcccgttacgctgtgcgattactacggtttcttccatctgtttttgttcaccatgctgctggttgttaccagcaataacctgattgtgatgtgggcggcgatcgaagccaccaccttaagcagcgcgtttctggtaggcatttacggtcagcgtagtagcctggaagctgcatggaagtacatcattatttgtactgttggtgtcgcttttggtctgttcggtaccgtgctggtatacgccaacgccgccagcgttatgccgcaggcagaaatggcgatattctggagcgaggttcttaagcaaagctccttgcttgacccaacattaatgctgttggcctttgtgtttttgctaattggctttggtaccaaaaccgggctatttcccatgcacgcctggctgccggatgctcacagtgaagcgccgagtccggtcagcgccctgctctccgccgtattgctgaactgcgcgctgttggtgctgattcgctattacatcattatttgccaagccatcggcagcgatttccccaaccggttgttgctcatcttcggcatgttgagcgttgccgtggcggcatttttcattctggtacagcgggacattaagcgtctgctggcgtactccagcgtggagaacatggggctggtcgcggtggagctaggcattggcgggccgctgggaatttttgccgcgctgctgcacatcttaaaccacagtctggcaaaaacgctgctgttctgcggttccggcaatgtactgctcaagtacggcacgcgcgatctcaacgtcgtctgtgggatgctcaaaatcatgccatttaccgccgtgctgtttggcggcggtgcgctggcgctggcagggatgccgcccttcaacatttttcttagcgaatttatgaccattaccgccggactggcacgtaatcacctgctgattatcgtcctgctgttattgctgttaacgctggtgctggcgggcctggtacggatggctgcgcgggtgttaatggcgaaaccgccgcaggccgttaaccggggtgatctcggctggttgaccaccagcccaatggtgattctgctggtcatgatgctggcgatgggaacgcatattccacaacctgtcatcaggatcctggcgggcgcttccactatagtcctcagtgggacgcacgatctgcctgcacaacgtagcacctggcatgattttttgcctagtggcaccgcatctgttagcgagaaacacagtgaacgttaatagtagcagtaatcgtggcgaagcgattctcgccgccctgaaaacgcagttccccggcgcggtgctggatgaagagcgacaaacgcctgaacaggtcaccattacggtgaaaatcaatctgctgcctgacgttgtacagtatctttattatcaacatgatggctggcttccggtcctgtttggcaacgacgagcggacacttaacggtcattacgcggtttattatgcccttagtatggaaggggccgaaaaatgctggattgtggtgaaggcgctggtcgatgccgacagtcgggagtttccgagtgtcacaccgcgcgtccctgccgcggtctggggcgagcgagaaattcgcgatatgtacgggctgattccggttggcctgccggatcagcgtcgcctggtgttgcccgatgactggccggaagatatgcatccgctgcgcaaagatgcgatggattatcgactgcgccctgaaccgacgactgattccgaaacgtatccgtttatcaatgagggcaacagcgatgcgcgggtgatccctgtcggcccgctgcatatcacctccgatgaaccgggtcacttccgcttgtttgtggatggcgagcaaattgtcgatgctgattaccgcctgttttatgtccatcgcggcatggagaaactggcagaaacgcggatgggctacaacgaagtgaccttcttaagcgaccgcgtgtgtgggatttgcggttttgcccacagtgtggcctataccaatagcgttgaaaatgcactggggattgaggtgccgcaacgagcacatactattcgcagcattctgctggaagtcgaacggctacacagtcatttgcttaaccttggcctctcctgccatttcgttggttttgataccggctttatgcaatttttccgcgtgcgggaaaagagcatgacgatggcggaattgctgatcgggagccgtaaaacctacggtctgaatctgattggtggtgttcgccgcgatattctcaaagagcaacgtctgcaaacgctgaaactggtgcgcgagatgcgcgccgacgtgagcgagctggtagagatgctgcttgctacgccgaatatggaacaacgcactcagggcattggcattctcgaccgacaaatcgcccgtgatttgcgctttgatcacccctacgccgactacggcaatattccaaaaacactgtttacctttaccggcggcgatgttttctcccgcgtgatggtccgtgtcaaagagacgtttgatagcctggcaatgctggaatttgccctcgacaacatgccggataccccactgctgaccgaaggctttagctataaacctcacgcattcgcgctgggctttgttgaagcgccacgcggtgaagacgtgcactggagcatgctcggtgataaccaaaaattgttccgctggcgctgccgtgccgccacctacgccaactggccggtgttgcgttacatgctgcgcggcaataccgtttctgacgcaccgctgattatcggtagccttgatccctgctactcctgtaccgaccgtgtgacgctggtagatgtgcgcaagcgccagagtaaaaccgtgccgtataaagagatcgaacgctacggcattgatcgtaaccgtagcccgctgaagtaaggacagaagatgctgaagttactgaaaactattatgcgcgccggaaccgcgacggtgaaatatcccttcgcgccactggaggtcagccctggctttcgcggaaaaccggacctgatgcccagccaatgtattgcctgcggtgcctgcgcctgtgcttgtccggcaaatgcgctggctatccagaccgacgaccagcaaaatagccgcacctggcagctctatctggggcgttgtatttactgcggacgttgtgaagaagtgtgcccgaccagagccatccagcttaccaataactttgaactgaccgtcaccaataaagccgatctctatacccgcgcgacgttccatctacaacgttgcagccgttgcgaacgcccgtttgccccgcaaaaaaccatcgcactggctgctgaattgttagcacagcaacaaaatgcgccacaaaaccgcgaaatgttgtgggcgcaagcgagcgtctgcccggaatgcaaacaacgcgcgacgctgatcaacgacgatacagatgtactgctggtggctaaggagcagctatgagtccagtgcttacacaacatgtcagccagcccatcacgctggacgagcaaacgcaaaagatgaagcggcatttgctacaggatatccgtcgcagcgcttacgtttatcgcgtcgattgcggcggctgcaacgcctgtgaaatcgaaatttttgctgccattacaccagtattcgacgcagaacgttttggcattaaggttgttagtagtccgcgtcacgccgatattttgttatttactggcgcagtcacccgggcgatgcgtatgcctgcacttcgggcgtatgagtctgcccccgatcataaaatttgtgtttcctacggcgcgtgcggtgtcggcggcggtattttccacgatctctacagcgtctggggcggtagcgacaccattgtccccattgatgtttggatccccggctgcccgccaacaccggccgccaccattcacggtttcgccgtggcgctcggtttgctgcaacagaagattcacgctgtggattatcgcgatcccaccggggtgactatgcaaccgttgtggccgcagatcccgccaagtcagcgtatcgccattgagcgagaagcgcggcggctggcgggctatcgtcaggggcgagaaatttgcgatcggctcctgcgccatttaagcgacgatcctacaggaaatcgggttaacacctggttgcgcgatgccgacgatccacgtctcaatagtatcgttcagcaactctttcgcgtactccgggggttacatgactgaagagtgcggggaaattgttttctggacgctgcgaaaaaagtttgtcgccagtagcgacgagatgccggaacacagctctcaggtaatgtattacagcctagctatcggccatcacgttggcgtgattgattgtctgaatgtcgccttccgctgcccactgacggaatacgaagattggcttgcactggtcgaagaggagcaagcccgacgtaagatgctgggggtgatgacttttggtgagattgttattgacgccagccacaccgccctgttgacccgggcattcgcgccactggcggatgacgcgacgtctgtgtggcaggcgcgtagcattcaattcattcatctgttggatgaaattgtgcaggaaccggccatctatctgatggccagaaaaattgcgtgagaaggatttctcattaataaggactgttgatggctatgagtgacgaggcgatgtttgccccgccacaaggaataacaattgaagcggtaaacggaatgctcgcggagcggttagcacagaaacacggcaaggcgtctttattacgcgccttcatcccgctgccgccgccgttcagcccggtacaacttattgaactgcatgttctcaaaagcaacttctattaccgctaccatgatgatggcagcgatgtgacggcaacaacagagtatcagggcgagatggtcgattatagccgtcacgccgtccttctcggcagtagtggaatggcggagctacgctttattcgcacccacggcagtcgttttacttcccaggattgcacactgtttaactggctggcgcggataatcaccccggttctgcaaagttggctcaatgatgaagaacagcaggtggcgctgcgtttgctggagaaagatcgcgatcatcatcgggtactggttgatattactaatgcagtgctgagtcatcttgatctcgacgatctgatcgctgacgtcgctcgtgagatccatcattttttcggtctggctagtgtcagtatggtactgggcgatcatcgaaagaacgagaagttcagcctgtggtgcagcgatctttctgccagtcattgtgcgtgtctgccacgctgtatgcctggcgaaagtgtattgctgacacaaacgctacaaacccgacaaccgaccttgacgcaccgtgcagatgatctgtttctctggcaacgcgacccgttattactcttacttgcatctaacggctgcgaatctgcgctccttataccgcttacctttggcaaccatacaccgggtgcattgttgctggcgcatacctcttccactctctttagtgaggaaaactgccagctactacaacacatagccgatcgcatcgctattgccgttggcaatgccgatgcctggcgtagcatgaccgatttgcaggaaagtttgcagcaagaaaaccaccagcttagcgagcagctccttagcaatctgggcatcggtgacattatctatcaaagccaggcaatggaagacctgctccagcaggtagatattgtggcgaagagcgacagtacggtgttgatttgtggtgaaaccggaactggcaaagaggtgatcgccagagcgatccatcaacttagcccgcgacgcgacaagccgctggtcaaaatcaactgcgctgccatccccgccagtcttctggaaagtgagttattcggtcatgacaaaggggcgtttactggtgcgattaatacccatcgtggtcgttttgaaattgccgatggcggcacgttgtttctcgatgaaattggcgatctgccgttagaacttcagcctaaactgctgcgcgtattgcaggagcgggagattgagcgtctcggcgggagtagaacgatcccggtgaatgtcagagtcattgccgccaccaaccgtgatttgtggcaaatggttgaagatcgccagtttcgcagcgatctcttttatcgcctgaatgtcttcccactggaattgccgccgctacgcgaccgtccggaagatatccctcttttagcaaaacatttcacgcaaaaaatggcgcgccatatgaatcgcgcaattgacgccatcccgaccgaggcactacgccagttgatgagctgggattggccgggcaacgtgcgcgagctggaaaacgtgattgagcgggcggtactgttgactcgtggtaacagtctgaatttacatctaaatgtccgacaaagccgtttactgccgacgctaaatgaagatagtgcgcttcgcagtagtatggcgcagttactgcacccgacgacgccagagaatgacgaagaagaacgtcagcgcattgttcaggtattgcgagaaaccaatggcattgttgccgggccccgtggcgcagcgacgcgattagggatgaagcgcaccacgctgctgagtcgaatgcagcggctggggatcagcgttcgcgaggtgttgtaatctgcttttgcaggagtatgcatgagaaacaaactctctttcgacttgcagttgagcgccagaaaagcggcaatcgctgaacggattgccgcccataaaattgcccgcagtaaagtgagcgtctttttaatggcgatgtccgctggcgtgtttatggcgatcggatttactttttacctttccgttatcgccgatgccccgtctagtcaggcattaacccatctggtgggcggcctttgctttacactcggctttattttgctggcggtttgcggcaccagcctgttcaccagcagcgtaatgacggtgatggcaaaaagtcggggcgtcattagttggcgaacttggctgattaacgcacttctggtggcctgcggtaatctggcaggtattgcctgtttcagtttgttaatctggttttccgggctggtgatgagtgaaaacgcgatgtggggagtcgcggttttacactgcgccgagggcaaaatgcatcatacatttactgaatctgtcagcctcggcattatgtgcaatctgatggtttgcctggcgctgtggatgagttattgcgggcgtagcttatgcgacaaaatcgtcgccatgattttgcccatcaccctgtttgtcgccagtggctttgagcactgtatcgccaatttgtttgtgattccgttcgccattgccattcgccatttcgcccctccccccttctggcagctggcgcacagtagcgcagacaattttccggcactgacggtcagccattttattaccgccaatctgctcccggtgatgctgggtaatattatcggcggtgcggtgctggtgagtatgtgttatcgggctatttatttacgtcaggaaccctgaaaaatcagcccggcgaaacagttcgtcgggctgaagattattcttgcgcgatttgcccatcgggccaggcatgaatcacggctttgatcagcgtcgccaacggaatggcgaagaatacgccccagaatccccacaaaccaccgaagatcaccacgcttaaaataatcaccagcggatgcaggttaaccgcttcggagaacaacaccggcactaacaggttgccgtccagcgcctgaataatcagatacaccgcgaagcagctccagaattcagtacctgcgccaaactggaatagcgccacgccaaccaccggaatggtcaccacaaatgcgccaatgtacggaataagaacgctgaagccgaccagcactgccagcagcaggctatagttcagcccgaagagcaagaaccccagccaggtggcgatccccaccacgatcatctccagcactttgccgcggatatagttggtgatttgttgattcatctccttccacacctgtcctgccagcccacggttacgcggcagcacccggcgaacggcgttcagcatctgctctttgtctttcagcaggaagaagaccatcaatggcaccagcaccagatagacggctatggtcagcaaaccgaccaggctggcgagggaaattttcaccacgctatcgcccatggtcagcatccgactgcgcatattttcggccattgcatcaataatgcccgcgtccattaacgccggatagcggcgcggcaacgtggcggcaaagtcagaaagcttattgagcatccccggcatatcgcggattaagtagatgccctgttgccaggcgataggcagtaccacgaacgccatcagtagcaatataccgacgaaaaccaccaatacaatgctcgtcgcccagcggcgggagcagccaatagattgcagacgcacggttggccattccagcaaataggccagcacaatagccaccagcaacggagcaagcaggccactaaagaaaaagataatgccaaatccggcaactaaaataaccagcaaggcaatcgcttccgggtcgctaaaacggcggcgataccattgcatcaacatttcgagcataaagaccttccctgaacctcaagagcgggattgcgatccgcaattgtatcgaaatgtcacaaaaaagacttcgctttttatgacggattcaggaaactgaaaagtcatttgagtgggctaatcttcgccgttacactcaaaggcggcgcggtgggaacgatatttcacagtatcggtcaaatgactatctccagaaatacaggatagaggttatgttcaggcagttgaaaaaaaacctggttgcaaccctcattgctgctatgaccattggtcaggtagccccggcgtttgccgacagcgcagacaccttgccggatatgggaacctccgcaggaagcacgctttccattggtcaggaaatgcagatgggcgactattatgtccgccagctacgcggcagcgcgccgttaattaatgacccgctgttaacgcaatatattaatagcctggggatgcgtctggttagccatgccaatagcgttaagacaccgtttcatttttttctgatcaacaacgacgaaattaacgcctttgctttctttggcggcaacgtggtgctgcactctgccctgttccgttattccgataacgaaagtcaactggctagtgttatggcgcacgaaatctcccacgtcacccaacgtcacctggcgcgagcgatggaagatcagcagcgcagcgcgccgctgacctgggtcggcgcgttaggttctattttactggcgatggccagtccgcaggcggggatggcggcgctgaccggtacactggcgggaacgcgtcaggggatgatcagtttcacccagcaaaatgaacaggaagcggaccgcattggtattcaggtgctgcaacgcagcggattcgatccgcaggcgatgccaaccttcctcgaaaaattactcgatcaggcgcgttactccagccgcccgccggaaattttattgactcacccgttgccggaaagtcgtctggcagatgcccgcaaccgtgctaatcagatgcgcccgatggtggtgcagagcagcgaagatttctatctggcgaaagcgcgcacactggggatgtataattccggacgtaaccagctcaccagtgatttgctggatgaatgggcgaaaggaaacgttcgtcagcaacgagcagcacaatatggtcgtgctttacaggcgatggaagccaataaatacgacgaggcgcgtaaaacgctgcaaccgttactggcggcagaacctggcaacgcatggtatctcgatctggctactgatatcgatcttgggcaaaacaaagccaatgaggcgatcaatcgtctgaaaaatgcccgcgatttacgcaccaatccggtgttgcagctcaacctggcgaacgcttatttgcaaggcggtcaaccacaagaagcggccaatattctgaatcgctacacctttaataataaagatgacagcaacggctgggatttgctggcacaggcggaagccgcgctaaataaccgcgatcaggagctggctgcgcgagcagaaggttatgcgctcgccggacgactcgatcaggccattagcctgttgagtagcgccagtagccaggtgaaattaggcagcctgcaacaagcgcgttacgatgcgcgcatcgaccagttgcgccagctgcaggaacgctttaagccttataccaagatgtaattcgcattaaaggaagaacaatgaccaaacaggtaaaaatctaccataacccacgctgtagtaagagccgggaaacgctgaacctgctgaaagaaaacggcgtggagccagaagtggtgctctaccttgagacacccgccgatgcggcaacgctgcgcgatttgctgaaaatactggggatgaatagcgcccgtgaattgatgcgccagaaagaggatctttataaagaactgaacctggctgacagtagccttagcgaagaggcgctgattcaggcaatggtggataatccgaagctgatggagcgcccgattgtggtcgcgaatggcaaagcgcggattggtcgtccaccggagcaggtactggaaatcgtgggttaagatgtgctccatcgctagttgaagcacattgccggatgcgacgcttgccacgtcttatccggcctacgaatactatggattaacttcgcgtagttcggataaggcgttcgcgccgcatccgacaataaacaccttatttacaacttcagaatttctttcacaaacggaatggtcagcttacgttgcgcggtaatgctcgcacgatccaactgatccaacgtcataaatagcgtgcgcatttctctgtcgagccgcttcagcaagaaacgccccacatcttccggcagttcaaaaccacgcaaacgcgcgcgtaactgtagcgcctgcaacttatcttcatcagaaagtggctgcaatttgtagatctgcccccagtcgagtcggctcgcgagatccggtaatcccagattcaactgccgcggtggacgatcgccggtgatcaacaaccgtgttttgccgctttccagaattcgattgtagagatcgaaaatcgccatctcccacaactcatcgcctgcaatacactcaatgttgtcgatacagaccaggctcaaatgctccataccgtcgagcacttccggaacaaaccaggtgcgtttatccagcgggacatagcccaccgcatcgccacgctggctcaattccgcgcaagccgcgtgcagcagatggctgcgccccgcgccttcgcgtgcccagagatagatgtaaccgctatgttcctgacgcagcacgttttgcagcgcggccagtaaagaggagttatcccccggccagaaacttgcaaaggtttcgtcgtcaggaagataaagtggcaaagagagctgtgccggtgtgttcagagatacctcaaccaggatttcacaaaatcggctgaagtttaccacagaatcccatgatgtttgaaccgggcagcaacactgcccggtcggtacattatttgtctgttatatccgcgtcttctgcgtccagcaccacttcttcagggcgcagcacactgatcagtttgaagatcaaacttaagccgataccgacgatggtcgccagcgccataccttttaactccgccgcgccgatgtttaccttcgcgccactgacgccgatgatcaaaatcacggaagtcaggatcaggttctgtgctttgttgtaatccactttgctttcgatcaaaacacgaataccggaagcaccgatgacaccataaagcagcaggctaacgccgcccatcaccggcaatgggatcatctggatagcggcagccagtttaccgacgcaggaaagcaggatagcgaaaatcgccgccccgccgataacccaggtactgtaaacacgggtgatcgccatcacgccaatgttttctccgtaagtagtatttggcgtagagccaaagaagccggaaatcacggtgctcaagccattagcaaacatgctacggtgcagacctggatcgcgcagcagatcttttttgacgatattagccgttactaccaggtgccctacgtgttcggcaataaccactaacgccgctggcagaatagtcagaatggcaaaccactcgaagcgcggcgtatagagggttggcagcgcaaaccagtgagcattaataatcggcgtggtatcgacaattcccattgcgaaagagagcgcgtaccccaccagcacgccaattaaaatcgggataattgccaggaaaccacgaaacagcacggaacctaaaaccgtgaccgccagggtggtaatagagatgatgatggttttggagtctggcgtttgcccttcagccgggagtaaacccgccataccggcagctacgcccgccagctccagaccgatgacggcaacgattgcgcccattgccgcaggtggaaacagcacgtccagccagccggtccccgctttcttcacgataaaagaaaccaggcagaacagcacgccgcacataataaagccgcccagcgcgacttcataccctaacggcaacagtaacaataccggactaataaaggcaaagctggaaccaagataagccggaattttccctttacagatgaagagatacagcagcgttccaataccgttaaataacagtacagtcgccgggttaatatgaaataagacgggcaccaggacggttgcaccaaacatggcgaacaaatgttgcaaactaagcgggattgtctgtaaaagtggcggtctttcactcaccccgatagcacggcgcgtcatagtattatcctctgtattatgtgttataggcgctttactcaaaaaaaagccgactcttaaagtcggctttaattatttttattctttatttcgtaccaaagattttgtcaccggcatcgccgaggcccggaataatgtatccgtgctcgttcagtccctgatcaatgcttgcggtatacagttcgacgtccgggtgcgctttttccagcgcagcgataccttctggcgcagctaccagcaccagaactttgatgctgctgcagcccgcttttttcagcaggtcgatggtcgcgataacggaaccaccggttgccagcattgggtcaacgatcagcgccatacgctcatcgatgttagaaaccagtttctggaagtacggtaccggctccagcgtttcttcattacggtacataccgacaacgctgatgcgcgcgctcggaacgttttccagcacaccgtccatcataccaagacccgcacgcagaattggcacaacggtaattttcttacctttgatctggtcgatttctaccgggccgttccagccttcgatagttactttttccgtttcgaggtcggcggtcgcttcgtaagtcagcaggctacccacttcggaagcgagttcgcgaaagcgcttggtgctgatatcttgctcacgcatcagtcccagcttgtgtttgacgagtgggtgtttgacttccacgatcttcatactctttctcctttgaggggcagccacaaaaaaaatcgacggattatacctcctttcttcaaggcggcaatattcttttcgttgactttagtcaaaatgataacggtttgagataaagttattttatattcagatggttatgaaagaagattattccatccgaaaactaacctttaccctggcacaagtcttctttcgccgcgcgcctggggaaaagacgtgcaaaaaggttgtgtaaagcagtctcgcaaacgtttgctttccctgttagaattgcgccgaattttatttttctaccgcaagtaacgcgtggggacccaagcagtgaccgataaaacctctcttagctacaaagatgccggtgttgatattgacgcgggtaatgctctggttggaagaatcaaaggcgtagtgaagaaaacgcgtcgtccggaagtgatgggcggtctgggcggcttcggtgcgctgtgtgcattgccgcaaaaatatcgtgaacccgtgctggtttctggcactgacggcgtaggtaccaagctgcgtctggcaatggacttaaaacgtcacgacaccattggtattgatctggtcgccatgtgcgttaatgacctggtggtgcaaggtgcagagccgctgtttttcctcgactattacgcaaccggaaaactggatgttgataccgctagtgcggtgatcagcggcattgcggaaggttgtctgcaaagtggctgtagtctggtgggtggcgaaacggcagaaatgccggggatgtatcacggtgaggattacgatgtcgcgggtttctgcgttggcgtggtagaaaaaagtgaaatcatcgacggctctaaagtcagcgacggcgatgtgctgattgcactcggttccagcggtccacacagcaacggctatagcctggtgcgcaaaattcttgaagtcagcggttgtgatccgcaaaccaccgaacttgatggtaagccattagccgatcatctgctggcaccgacccgcatttacgtgaagagtgtgctggagttgattgaaaaggtcgatgtgcatgccattgcgcacctgaccggcggcggcttctgggaaaacattccgcgcgtattgccagataatactcaggcagtgattgatgaatcttcctggcagtggccggaagtgttcaactggctgcaaacggcaggtaacgttgagcaccatgaaatgtatcgcaccttcaactgcggcgtcgggatgattattgccctgcctgctccggaagtggacaaagccctcgccctgctcaatgccaacggtgaaaacgcgtggaaaatcggtatcatcaaagcctctgattccgaacaacgcgtggttatcgaataatgaatattgtggtgcttatttccggcaacggaagtaatttacaggcaattattgacgcctgtaaaaccaacaaaattaaaggcaccgtacgggcagttttcagcaataaggccgacgcgttcggccttgaacgcgcccgccaggcgggtattgcaacgcatacgctcatcgccagcgcgtttgacagtcgtgaagcctatgaccgggagttgattcatgaaatcgacatgtacgcacccgatgtggtcgtgctggctggttttatgcgcattctcagcccggcgtttgtctcccactatgccgggcgtttgctgaacattcacccttctctgctgccgaaatatcccggattacacacccatcgtcaggcgctggaaaatggcgatgaagagcacggtacaagcgtgcatttcgtcaccgatgaactggacggtggcccggttattttacaggcgaaagtcccggtatttgctggtgatagcgaagatgacatcaccgcccgcgtgcaaacccaggaacacgccatttatccactggtgattagctggtttgccgatggtcgtctgaaaatgcacgaaaacgccgcgtggctggatggtcaacgtctgccgccgcagggctacgctgccgacgagtaatacccccgtaattaaagcgccagctctgccgctggcgtttttcaattcacctgtaaatcgcaagctccagcagtttttttcccccttttctggcatagttggacatctgccaatattgctcgccataatatccaggcagtgtcccgtgaataaaacggagtaaaagtggtaatgggtcaggaaaagctatacatcgaaaaagagctcagttggttaagcttcaatgaacgcgtgcttcaggaagcggcggacaaatctaacccgctgattgaaaggatgcgtttcctggggatctattccaataaccttgatgagttctataaagtccgcttcgctgaactgaagcgacgcatcattattagcgaagaacaaggctccaactctcattcccgccatttactgggcaaaattcagtcccgggtgctgaaagccgatcaggaattcgacggcctctacaacgagctattgctggagatggcgcgcaaccagatcttcctgattaatgaacgccagctctccgtcaatcaacaaaactggctgcgtcattattttaagcagtatctgcgtcagcacattacgccgattttaatcaatcctgacactgacttagtgcagttcctgaaagatgattacacctatctggcggtggaaattatccgtggcgataccatccgttacgcgctgctggagatcccaagtgataaagtgccgcgctttgtgaatttaccgccagaagcgccgcgtcgacgcaagccgatgattcttctggataacattctgcgttactgccttgatgatattttcaaaggcttctttgattatgacgcgctgaatgcctatagtatgaagatgacccgcgatgccgaatacgatttagtgcatgagatggaagccagcctgatggagttgatgtcttccagtctcaagcagcgtttaactgctgagccggtgcgttttgtttatcagcgcgatatgcccaatgcgctggttgaagtgttacgcgaaaaactgactatttcccgctacgactccatcgtccccggcggtcgttatcataattttaaagactttattaatttccccaatgtcggcaaagccaatctggtgaacaaaccactgccgcgtttacgccatatttggtttgataaagcccagttccgcaatggttttgatgccattcgcgaacgcgatgtgttgctctattatccttatcacacctttgagcatgtgctggaactgctgcgtcaggctagcttcgacccgagcgtactggcgattaaaattaacatttaccgcgtggcgaaagatagtcgcatcatcgacagcatgatccacgccgcacataacggtaagaaagtcaccgtggtggttgagttacaggcgcgtttcgacgaagaagccaacattcactgggcgaagcgcctgaccgaagcaggcgtgcacgttatcttctctgcgccggggctgaaaattcacgccaaactgttcctgattagtcgtaaagaaaacggtgaagtggtgcgttatgcacacatcgggaccgggaactttaacgaaaaaaccgcgcgtctttatactgactatagcttgctgaccgccgatgcgcgcatcaccaacgaagtacggcgggtatttaactttattgaaaacccataccgtccggtgacatttgattatttaatggtaagcccgcaaaactcccgccgcctattgtatgaaatggtggaccgcgagatcgccaacgcgcagcaagggctgcccagtggtatcaccctgaagctaaataaccttgtcgataaaggcctggttgatcgtctgtatgcggcctccagctccggcgtaccggttaatctgctggttcgcggaatgtgtagcctgatccccaatctggaaggcattagcgacaacattcgtgccatcagtattgttgaccgttaccttgaacatgaccgggtttatatttttgaaaatggcggcgataaaaaggtctacctttcttccgccgactggatgacgcgcaatattgattatcgtattgaagtggcgacgccgctgctcgatccgcgcctgaagcagcgggtactggacatcatcgacatattgttcagcgatacggtcaaagcacgttatatcgataaagaactcagtaatcgctacgttccccgcggcaatcgccgcaaagtacgggcgcagttggcgatttatgactacatcaaaagtctcgaacaacctgaataaccctatgccaatacacgataaatcccctcgtccgcaggagtttgctgcggtcgatcttggtagtaacagttttcacatggtcatagcccgtgtggtagatggtgccatgcagattattggccgcctgaaacagcgggtgcatctggcggacggcctggggccagataatatgttgagtgaagaggcaatgacgcgcggtttaaactgtctgagcctgtttgccgaacggctacaagggttttctcctgccagcgtctgtatagttggtacccatacgctgcgtcaggcgctgaacgccactgactttctgaaacgcgcggaaaaggtcattccctacccgattgaaattatttccggtaatgaagaagcccgtctgatttttatgggcgtggaacatacccaaccggaaaaaggtcgcaaactggttattgatattggcggcggatctacggaactggtgattggtgaaaatttcgaacctattctcgttgaaagccgccggatgggttgtgtcagctttgcccagctttattttcctggcggggtcatcaataaagagaattttcagcgcgctcgcatggcggcagcacaaaaactggaaactttaacctggcaattccgtattcagggctggaacgttgcaatgggcgcttccggtaccataaaagccgcccatgaagtgttaatggaaatgggcgagaaagacgggataattaccccggaacgtctggaaaaactggtaaaagaagttttacgtcaccgtaatttcgcaagcctgagtttaccgggtctttccgaagagcggaaaacagtcttcgttccgggactggcgattttatgcggtgtgtttgatgctttagccatccgtgaactgcgcctttctgacggggcgttacgcgaaggcgtactgtatgaaatggaaggacgtttccgtcatcaggatgtgcgtagtcgcaccgccagcagcctcgccaaccagtatcacatcgacagcgaacaggcccgacgggtgctggataccactatgcaaatgtacgaacagtggcgggaacagcaaccgaagctggcgcatccgcaactggaggcgctactgcgatgggccgccatgctgcatgaggtcgggttgaatatcaaccacagcggtttgcatcgccactccgcttatattctgcaaaacagtgacttgccgggttttaatcaggaacagcagctgatgatggcgacactggtgcgctatcaccgtaaagcgattaagctcgacgatctaccgcgctttaccttgtttaagaagaaacagttcctgccactgatacagctattgcgccttggcgtattactcaacaatcaacgtcaggcaaccaccacaccgccaacattgacgctgattactgatgacagtcactggacactgcgtttcccgcatgactggtttagtcagaatgcgctggtactgcttgatctggaaaaggagcaagaatactgggaaggcgtggctggctggcggttgaaaattgaagaagaaagtacaccagaaatcgccgcttaatactttgcgggccgacgagaaatgtcggcccgcattattcaggcactttcgcgaatgggttcgatttcattcagcgtatcaattaacggctgcggcttaccaataagataaccctgcatataatcgatccccaaagagagcaccgcctcgcggatctcttcgttttcaacgtactctgccactaccagcattttcttcattcgcgccaggtggcaaatgcttgccactatctgataatccagactattactcacaatattgcggataaaactgccgtcaattttaagcagatcggcattcacatttttaagccgcgcatagctggcgtagccggtgccgaaatcatcaatcgcaatctggcagcctaattcctgaagatgctgcaaggtgatttgcgcctgcttaacattggtcagagcattactttcggtgacttcaaaaataagttgccacgcttcaatctgatatttagccagcaactgactgacttcaacaggaaaacgagcctgacatacgctggttggagacagattaatagcaaaacggtgagcgggcatcttcgctctgttttcagccataaattgcagcgtatgctcaatgacccacatgtcgatactgctgcttaaaccaaattcgtgcgcgaccggcaagaagctatcggggctgatcagttcatcattctcacctttcatgcgcagaagaatttcatggtaaacatcaccacgcataccggtaatcggctgggccatcaggaaaaaatggttgtgttccagcgcctgctgtagtcgattcatcatcgcgactttatctttcaattcgcgttgcaaatacattgccccgcgacgctgcatattttccggggcgttggtcacgatggaaagttcggcgaccgtatttagctctcccagcagcaggtagatatgattcactgggctgcgcacatagcagtaactgacgccaatctgcggttgcatcggcatgccatcccaaaagaaacgaaattgcttgagatggctatccagtgcggtaatgcgctcctggtggctttctgtattcagtcgcagcgcgagatcgttaccgctaagctgataaacatcttcacccggttccagcaagggactcagccagtgagaaagtttttgcttgtattgaatccgcagcatgatgccatagttcttaaccagcatttccatgccagggatgcgtaaataacaaagcgcagaccagggggcatcacgcaacgcgcgattcagggcgcgaacatttggcagatgaaccaccgggtccacatacgcaagccgctgaatgcgtctgactaccgctctctgacgggttgccagtacagccatataattgacaataaaagagaataccagataactggaggaggttatggtcagctgcgtggtatagccaggataaatgggaatgtaattttgatagctgtggatgctgatcatcaacacgaccgcccagagcaggctaatcagcttataaccatagcgcatcgctccccacatcatcaggggcagcaataaactcaaggtataattggtgctaaaaattgtgcttttttcatttaacggcatgcataacagcaacaataaagcacctaatgccagtagccagagcgcgaactcttttttggtgactttggcatcaacctgctgttttaattggctataatagctacgtaaataaaatggatttcgcactacccgaatgatgaagtagcacagcgggacaccgatcagattacccaccagtaaggcctgataattgattaaagtcccgaggttaaaaggcatgacaccgaccagattttctctgctcgccagtaatcctacaaatgcagcaaactggaaaagtatcagaaacagcgttgcaggaaacacaatctgccagaatatacgctgggaaattaaacgggtatcaccatgactaacgttgttacgccggggagtaaagaccctgtaaccgccccaacagagaatgataatgataataaaattagccgttaaacttagcgtttcgtaaaaacccagctctgcatatttgcggacaaaaatccctaaggcgatccctggcaatgccgcccagctgaaaaacatcatcatgctgatcatcagtgccagaggcagataaaagagaaaaacctcaccggaagaaatatgcgcgaaagtattaatgtgggcgaaaatgggcaagattaaagaaggcaggaacagcggaagcccccaccatttatcacgtatttttatataagttgcattcagtttcatagatgctcagcagaatcccccacatcctgaaggaggtgtattcagacaggcatcccacctgacttcgaatgatgattattcatcactatagagagcattgattctaagtgtcatatgaaagtaccaattgatatatatcaaacaaaataaccctgattaatgaattattacgtttatcatgttaattcatcattattacatcatcattgtaaataattaaattaacttccataacattaaaatatgtatccactgacgcttttttacataacgaagaattgaccattttgtcctgttgtgccttaatgtaagtaccgtccacagcgtgggacatacttcaaggaaccttttgtgagtcaggcaaccagtatgcgaaaacgacaccgatttaacagtcgcatgacccgtatcgtactgctcatcagctttatcttcttctttggccgttttatctacagctccgtcggtgcctggcagcaccatcagagcaaaaaagaagctcagcaatccacactctccgtcgaaagtccggtacaacgttaacggttaccttctccactttcacagaacataacggcacttcgctgtcggatgcttttgctgtttgggattatcaaagcggcagatattctttcatcttaaattttacgtctttatcctgactgatgtttatcctgtttggctgcgaaataaatataaaattaatatatatgttgtaatgatatatttttataaattattccctgcgtgaattttaataaatttaatctatccctttatacgcaatacatttactttcctcttttgatgatcttaaatgtcttatttttcgtaatgtgtataacaaggaatagtgatgaaatttaaaaaatgtcttctgcctgtggcaatgttagcgagtttcactctggcaggatgccagagtaatgctgacgatcatgctgccgatgtttatcaaaccgatcaactgaataccaaacaagaaactaaaaccgttaatattatttccattcttcccgcaaaagttgccgtagacaactcccaaaataaacggaacgcacaagccttcggcgcgcttattggcgcagtcgctggcggtgttatcggccacaacgtcgggtctggcagcaattccggaacgacggcaggtgcagttggcggcggagctgtaggcgcggcagcgggttctatggtgaatgataaaaccttagtggaaggtgtttctttaacctataaggaaggcaccaaagtgtatacctctacccaggtgggtaaagagtgccagtttacgacaggtttagccgttgttattaccacgacgtataacgaaacgcgtattcagccaaataccaaatgtcctgaaaagagctaataatcaggaggagtcatgaagaaagtttttctttgcgccatcttagcctccttaagctatccggctatcgccagtagtttgcaggatcaactctctgctgtcgcagaagcggaacagcaaggtaaaaatgaagagcaaaggcagcatgacgaatgggtcgcggagcgcaacagggaaatccagcaagagaagcaacgtcgcgcaaatgcccaggccgccgctaacaaaagagcggcaacggcagcggcaaataagaaagctcgtcaggataaactggacgccgaagcctctgcggacaaaaaacgcgatcaaagttatgaagatgagctacgcagcttagagattcagaaacaaaaactggcgctggcgaaagaagaagcccgcgttaagcgagaaaacgaatttatcgatcaggaactgaagcacaaagctgcgcaaaccgatgtggtgcaatctgaagctgacgccaacagaaatatgactgaaggcggtcgcgatctgatgaaaagcgtgggcaaagcagaagagaacaaaagcgacagctggtttaattaatcgatgttagtaacttcaatcctataattcttgaagataaaaaaccctctgtagtaacagagggttttgttcattcatagtgcagggtcaaatcattcccactcaatggtagctggcggcttgccgctgatgtcatacaccacgcgggaaataccgttcacttcattgataatgcggttggaaacgcgaccgaggaaatcgtacggcagatgcgcccagtgtgcggtcataaagtcgatggtttcgacagcacgcagagagacaacccagtcatacttacgaccatcgcccattacgccaacggaacgtaccggcaggaacacagtgaacgcctggctgactttgtcgtacaggtccgctttacgcagttcttcaatgaagatggcgtcagcacggcgcagcaggtcacagtactctttcttcacttcacccagaacacgaacgccaaggcctggtcccgggaacgggtgacggtacagcatgtcgtacggcaggcccagctccagaccaatcttacgcacttcgtctttgaacagctctttcagcggttcaaccaggcccatcttcatctctttcggcaggccgcccacgttgtggtgagatttgatgacgtgtgctttaccggttgcagacgccgcagattcgataacgtcagggtagatggtgccctgcgccagccacttcacgtcttccagtttcagcgcttcttcatcgaatacttcaacgaaaacgcgaccgatgattttacgttttgcttccggatcgttttcgccagccagcgcactcaggaagcgatcttctgccggtacgtgaacaatgttaagaccaaagtgatcgccaaacatatccagaacctgctctgcttcgttgaggcgcagcaggccgttgtcgacgaatacgcaagtcaggtttttaccgatagcgcggtgcagcagcattgcggttacggaggaatccacaccaccagagaggccgaggatgactttatcgtcgcctacctgctcgcggatgcgagctacagcatcgtcgataattttcgctggcgtccacagggcttcacactggcagatatcacgcacaaaacgctccagcatgcgcataccctggcgggtatgagtcacttccgggtggaactgtacgccatagaagcgtttttcttcgttagccataatggcaaacgggcagctttcggtgctggctacggtgatgaagtcggacggaatagcggtaactttatcgccgtggctcatccagacatcgagcagcggtttaccgtctgcggtcagcgcatcttcgataccgcgaaccagtgcgctgtcgtttacgacttcaacctgcgcgtagccaaattcacgttcgttagaggcttcaacgtgaccgcccaactgcattgccatggtctgcatgccatagcaaacgccgaataccggtacgcctgcttcaaagacatactgcggcgcacgcggactgttttcttcagtagtactttccgggccgccggaaagaataatgccgcttggattgaagtcacgaatttgtgcttctgtcacatcccacgcccacagttcgcagtaaacacccagctcacgcacgcggcgcgcaaccagttgagtgtactgagaaccgaagtccagaatgaggatgcgatgcttatgaatgttttccgtcattgacgcttattccgaggcaagtgaaacagataatataaatcgcccgacatgaagtcgggcgaagagaatcaggagcccagacggtagttcggggactctttagtaatggtcacgtcgtgaacgtggctttcctgaatgcccgcaccgctgatacgtacaaactccgctttagtacgcagttcgtcgatagtaccacagccggtcagacccatacaggagcgcaggccgcccatctgctggtgaatgatctctttcaggcgacctttataggctacgcgaccttcgataccttccggcaccagtttgtcggcagcgttatcgctctggaaataacggtcagaggaacctttggacatcgcgcccagggaacccataccacggtaagatttgtaagaacggccctggtagagttcgatttcacccggagattcttcagtacccgccagcatggaacctaccatcaccgcgcttgcgccagcggcgatagctttggcgatgtcgccggagaagcgaataccgccatcagcgataaccggaataccggtgccttccagggcttctactgcgtcagcaacagcggtaatctgcggaacaccgacgccagtcacgatacgagttgtacagatagagccagggccaatgccgactttaaccgcactgcaaccagcttctgccagagcgcgtgcacctgcagctgttgccacgttgccgccgataatttgcagatccggatatttagcacgggtttcacggatacgttgcagtacaccttcactgtgaccgtgggaggagtcgatcagcagaacgtcaacgcctgcggcaaccagcgcgtcaacacgctcttcgttacccgcacctgcgccaaccgctgcaccaacacgcagacggccttgctcgtctttacaggcgttcggtttacgttccgctttctggaagtctttcacggtgatcatgccgatcaggtggaattcgtcatcaaccaccagcgctttttcaacgcgtttttcgtgcatttttgccagcaccacttcacgggcttcaccttcacgcacggtgaccagacgctctttcggcgtcatgtaaacgctaaccggctggttcaggtcggtaacaaaacgcacgtcacgaccggtgataatacccaccagttcgttttcttcggtaacgaccggatagcccgcaaaaccgttacgctcggtcagttctttcacttcgcgcagcgtcgtggttggcagaacagtctgcggatcagtcaccacaccagattcgtgttttttcacacggcgaacttcttctgcctggcgttcaatggacatgtttttgtggataaagccgataccgccttcctgagccagagcaatagccaggcgcgcttccgttacggtatccattgctgcggaaagcatagggatattcagacgaatagttttcgtcagctgggtgctgaggtcagcagtattcggcagaacggtagagtgagcaggaacgaggagaacgtcgtcaaacgtcagagcttctttagcgatacgtagcatgggcaatatctcgaccagagtggttaataaatattgccgcggcattatacagagcgtaaccgattgcatctacccctttttgcaaaaaatgcttgctatccccgaagggcgggttactatcgactgaataacctgctgatttagaatttgatctcgctcacatgttaccttctcaatcccctgcaatttttaccgttagtcgcctgaatcaaacggttcgtctgctgcttgagcatgagatgggacaggtttggatcagcggcgaaatttctaatttcacgcaaccagcttccggtcactggtactttacactcaaagacgacaccgcccaggtacgctgcgcgatgttccgcaacagcaaccgccgggtgaccttccgcccacagcatgggcaacaagttttagttcgcgccaatattacgctctacgagccgcgcggcgactaccagataatcgttgagagtatgcagccggccggtgaagggctgctgcaacagaagtacgaacagctcaaagcgaagttgcaggctgaaggtttgttcgatcagcaatacaaaaaaccacttccctcccctgcgcattgcgttggtgtgatcaccagtaaaaccggtgctgcgctacatgatattttgcatgtgttaaaacgtcgcgatccttctctgccggtgatcatctaccctgccgccgttcagggcgatgacgcgccggggcaaattgttcgcgccattgaactggcgaatcagcgcaatgagtgcgacgtattgatcgtcgggcgcggcggcggtagcctggaagatttatggagttttaacgacgaacgcgtagcgcgggcgatttttaccagccgcattccggttgtcagcgccgtcgggcatgagacggatgtgaccattgccgattttgttgccgatctgcgtgcgccaacgccgtctgccgccgctgaagtagtgagccgtaatcagcaagagttactgcgccaggtgcaaagcacccgtcaacggctggagatggcgatggattattatctcgccaaccgcacacgtcgctttacgcaaattcatcaccgattacagcaacagcatccgcagctccggctggcacgccagcaaaccatgcttgagcgcctgcaaaagcgaatgagctttgcgctggaaaatcaacttaagcgtaccgggcaacagcagcagcggttaacacagcggctgaatcagcaaaatccacagccgaagattcatcgcgcgcaaacgcgcattcagcaactggaatatcgtttagcagaaaccctgcgcgcacagcttagcgccacgcgtgaacgtttcggtaatgcagtaacgcacctcgaagccgtaagcccactgagtacgctggcgcgtggatacagcgttactactgctactgacggcaatgtactgaaaaaagtgaagcaagttaaagcgggtgaaatgctaaccacacgtctggaagacggctggatagaaagtgaagtaaaaaacatccagccagtaaaaaaaagccgtaaaaaggtgcattaagccagcacgaattcaacgcgttttttgcttatcaagccatgcccgtgctgacagaagtaatctactgcaccacaggcttttaacacctgcaacggttgatggcagtctggacaaagagctttcatttcaataaattccccgcaggatcggcaacgcgcatggccgttatcctgatcaagcacatgctgacattgtggacaatgcagttccatatgaattcctccggtagccattccctctacattcatagagggaatggcagataaaatacttacggataattatttatttttcttgatgtgcttcatcagacgcttacgtttacgcatctgggttggcgtcagggtgttacgcttattcgcatacgggttttccccttctttgaactgaatacgaatcgggcttcccattacgtccaggcttttgcggaagtagttcatcaagtagcgcttgtaggaatcaggcaggtctttcacctgattaccgtgaatcaccacaatcggcgggttataaccaccggcgtgggcatatttcagcttcacacgacgaccgcgtaccagcggcggttggtgatcttcaacagccatcgtcatgatgcgcgtcagcatagaggtccccacacgacgggtggagctgtcatacgcttcacgtacactttcaaacaagttaccaacaccactgccgtgcaaggcagagataaagtgcacacgagcaaaatcgataaagcccagacggaagtccagcgtttctttcacctgctctttcacttcctgactcaggccatcccacttattcaccacaatgacaagactgcgcccactattgagaataaagcccagcaggctgagatcctgatcggaaataccttcgcgcgcatcaatcactaacatcaccacgttggcgtcttcaatggcctgcaacgttttgattacggagaatttctctacagcatcggtgattttgccgcgtttacgtacgccagcggtgtcaatgagcacatactcacgtccatcgcgttccattgggatgtagatgctgtcacgcgtcgtgccaggcatgtcgtaaacaacaacgcgctcttcaccaagaatacggttagtgagtgtagacttacctacgttcggacgacccacaatcgccagtttgatcggcagactttgcgggtcgaagtcgtcttcctcttcttcttcgccgttctcttccgcttcaaattgcgcccagtattcagcgtcttcgtcgacttcctcttgcggtgcgagatcttccatccacggcagcagcacatgctccagcagacttaatacgccacgaccgtgagacgcggcgatcgggtagatttcacctaaaccaaggctgtagaaatcaaccactgcctgatcgggatccagaccgtcagttttgtttgccaccaggaaggtcggtttttcacgggagcgcagatgtttggcaatcgcttcatctgccggcatcaggcccgcgcgcgcatccaccataaacagtacgacgtccgcttcttcaatcgccagcaggctttgttccgccatgcgggtttctacaccgtcttctgtgccatcaatcccgccggtatcaatacagataaactcacggccttcaatttccgcacgaccgtacttacggtcacgagtcagacccgggaaatccgcaaccagcgcatctcgggtgcgagttagacggttaaataacgtggattttcctacgttagggcgcccgacaagcgcgaccacaggtaccatgtttaaagcctcatttttataaatcatcagacaacgcacgctatattcgcgtcgttgttaaaaacaggaaaacggcccctgtccaggagccgttttcaaagtgaacgacagagacgattaacgtgtaatagagtacacggttccgtcttttgcctggatcagcagtttgccgtcagcggcaaccggttcagtctggaaaccggaactatcaactttttgctgggcaacgaaacgaccatcttcgacgttaatccagtgcagataaccttcactgtcaccgaccaccaggttgccattatacagcaccggagaagtcagcaggcgatgcagcagatcgctttgtgtccacagcgtaacgccgccatcaatggtcaacgccatcacccggtcattttgatcgaccagatagatgcgattgccgtcgacgatgaaatcattcacgctacccagttcgcgtttccacataatctgaccactgcgcagatcaagcgccgtcaggttaccattataggccagcgcgaaaacaacgccgttaacaacgacgggagtcgtgtcaacatcgctcagacggtcaatttcggtagaaccggtcgcctgggaaatacgctgctgccaaatcatctggccctgttccatcagcactgcgctgacgcgaccattatcgccccccacgacggccgcaccaaaagccgttgtcggcgcagactcgccacgcaaagagaggctaggcatatcgaggttaactgtccatttgacagcgccgtcagcttcgttcagcgcttgtaactgaccgttactggtgtggattaacaccagaccgtcgctgaccaccgggcggctaagtgcttcacccgcgactttagtttgccatgccacagtaccatcgctggtattcagcgcgtaaacctgcgccttttcgctgccaatgtagacatgcccaccagacacggtcacaccgccagaaagtaatgcaggctctttagagaaccagccatctttctcggccaggctgacagaccagatttctttgccatcatccgcattcagcgcttttactaaaccagcgcggtccgctgcatagacaacgttgtccgccagtgccggatgaagattggaatagaagttgccaatgccgctaccaacggaagtgctccacgccgtggtcggcgtaaactggttttcaacggttggcaatggggacatctttaccacatcttcttcgctgttaaacaggctacagccgcttaaaagggtaacggaaagcagtcctggcagcagtaatttacgcaattgcatcgggtccctctcagatggacaaattattaattttcatctgcatcatttcgctcagtgccggagtaacatcgcttttcacgcctgcttcccatgcactacgcgcaccttgcttatcacctttgctcagcaatgcttcaccacgcaggtcggcaacaatggcagcccacccttcacctttgatggtatcaagggttttcagcgcggcatcagcctgcttgagctgtacctgaacgcgagcaagacgcagatttatcacggctttgagattttcatcgctcgtgtctgccagcccctgttgtaactgggcggcagctttctctagttcatttttgtcaacaaattgctgcgcaagttccaaagaagccagcgcaccataagtatttttattttcagcagcaaatttttccgccgccgggatgctatccggtttgccttcgctcactgcggtaaccgcattttgataggcaagagaagcggagcgtgcagaatcaacctgatggctgttccagtagcgccagccaatcagtgcgccaacgcccaaaatcaccccaacagccagtgctttgccattttcagcaaaaaagcgtttaaccgcttctacctggtcgttttcgttctcgtaaatttccacgctgtccttctccttccttaacccagtaacgtgcgcaaatgcgcggctacgctatcctgcgcaactgccgtttgctcaccagagcgcaaatccttcactactgctgtgccgttagccacttcagactcacccagcaccacagcaacgcgggcaccccatttatcagcacgggcaaactgtttcttaaagttgccgccgccgtggttggtcatcaatttcacgcccggtaattcatcacgcagacgctcagctaatgccatagccgcagattgtgtatcagcaccactagccaccaggtatatatcgacaacaggatcggctttaaattccggattaacggcctgtactaacaatacaagacgttcgaggcccatagcaaaaccgacagccggtgttgcacgaccgcccagttgttccacaagaccgtcataacgaccgcctgcacacacggtgccctgggagccgagactgttagtcacccactcgaaaacggtacggttgtagtaatccagaccacgcaccagacgctggtttacggtgtaagcgatccccgcgctctccagcagtttgcacagaccggcaaaatgctcacgagattcctcgtccagatagtcacctaatgccggagcgtcgttgagaagcgcctgcacttccggatttttactatccagcacgcgcagcgggttagtgtacatgcggcgtttgcagtcttcgtccagcttttctttatgctgctcaaggaatgccaccagcgcatcgcggtaattggcgcgtgcttccaggctaccgatagagttcagctcaagagttacgtgctcggaaatacccagcgcgcgccaccagcgggcagtgagcataatcagttcagcgtcgatatccggaccttgcagaccgaaaacttcgcagcccaactgatggaactgacgataacgccctttctgcggacgctcgtgacggaacatcggcccgatataccacagacgctgttcctgattgtacagaagaccatgctcgatgccggcgcgtacacagcccgccgtcccttcagggcgcagagtcaggctgtcgccattgcgatcctcaaaggtgtacatctctttttcaaccacgtcggtgacttcaccaatcgcacgtttgaatagcggggtctgctctacaatcggcaagcggatttcactgtaaccgtagctgccgagcacgtttttcagtgtgccttcaatgcgctgccagatggccgtttcgccaggcaggtaatcgttcatgccgcgaatggcttgaatgttttttgccacgtttattctctttctgaatataaaaatgaaccctcaacgcttccctcaatgtttcgggagccatgcgggttcaatcatacacgggaagcgaggcgcttcccatcacgttattatttttcaacctgctgaacgtcaattcgacgcgcttcgtccagctgactggctttcgcacgaatgcgtgcttccagctggtcgatcatatcgttgttgtccagacggtctttgcgcacgccatcttcatagaggccgcttttcttgttgccgccggtgacgccgagtgtagaaaccagcgcctcacctgggccattcaccacgcagccgataatgctaacgtccatcggagtgatgatatcttccaggcgttgctccagcgcgttaaccgtaccgataacatcaaattcctgacggctacaggtcgggcaggcgatgaagttgatccctcggctacggatacgcaggcttttcaaaatatcgaaaccgactttgatctcttcgaccggatcggccgccaggcttacgcgcagcgtgtcgccgatgccttcagacagcagcagacctaaaccaatggcggattttactgccccgctgcgcgcaccaccggcttcggtgatccccagatgcaacggctgatcgatctgttttgccagcaaacgataagactcaacagcgaggaagacgtcagacgctttcacgctgactttgaactgatcgaagttcaggcgatcgagatgatcaacatgacgcatggcagattccagcaacgcctgcggcgtcggttcgccatacttttcttgcagatctttttccaggcttccggcgttaacgccaatacggatcggaatgtttttatcgcgcgcacagtcaaccaccatgcgaatacgctcttcattaccgatattgccagggttaatacgcagacaatcgacgccgtattccgctactttcagcgcaatgcgatagtcgaagtggatgtcagccaccagcggcacgttaacctgctgtttgatgagtttgaacgcttctgccgcgtccatcgtcggtacggatacacggacgatatcagcgccaacgcgttccagcgccttgatttgattgaccgttgcttcgacgtctgtcgtacgcgtattggtcatggactgtacggcgatgggagcaccatcgccaatcggcacattcccaacgtaaatacgtgtactttttctacgttgaattggagcctggttatgcatgaaaaatctcccgcgttacccgtctgttactgcgccggactttgttcggcattgagggtcagacgcgcaacctggttagttctgataaaacgactcagatcgacaggtttcccttgatactggatctgtactgcggctggcgcaccaattttcagtttgtacggtgcctggccggttaagttcaaattaccgtctttacgctgcataccgctaaacaattttttaccggtagcatcagtgacctccagccagcaatcggcagtaaagttcatcaccagcgcattcggatcagccaccggcgtggtcacgccagcctgatcggttggcaacggcgcagcaccatctggcgttgttgctgccgttggtgccggggtcgcggcggtatcaacatttgcctggctagggctaacaaccgcattctgttgcggatcaacagctggtgctggcgcagttacggcaggtgtttgcgtgttggttgcggtagtatccacagacgctggcggcgtggacgttgtagccgggtctgtagttgtgctcgtatttaatggaacactctgcccctgctcgctattactgctcagttccgcgctagattgatcggccatagtggtgatctcttcctgctgagctttgcggtcttgccaccaccaggcaccgctcaggccgataaccacaaacaacaccagccaagtgaaggtcatcagccagccgtcgcgttttttgcggcgtttaccgagggaaaaactctgcatcggcgcaacttttgcagcccgaagtggagcctgcttttccagccctggcagcagttcttcttctggaatatgtaccagacgcgcataagagcggatatatccgcgcaggaatgtactagcaagatcggcgggtgccttatcttcttcaatgtcgcgtaccgtggaaaccttcaggcaaagtcgctcggcaacggcctgctgactaagtcctagttgttcgcgagcattacgcaggcgagcgccggtagtaagtgcttcattttggtcgtgcgtggcttcagtattcattcgctgcaggtacgtttaaatgagaattgagatgccggtgaaccatcatgctcacccacaccgcgaaacatccgttaagttaaccgttatcatacagtataagaccgtctgtgtgctcgtgacaaagcccacattcactaaggctaacttactgttgcatcgttacatactgccttaaagtcagcaaaaacgcaccgttaatattgaccagacaattgcaacttaatacttcattcataaaacattacgccacggtacataaagtaaccgtggcgtaatggctatcagaccgctttaatgtcgatggcttcaccctgcatccgtttacgcagggtacgtttcgtacggtcgataacatcgcccgccaactgaccacaggcagcatcgatatcatcaccacgagttttacgcacaatagtggtgaaaccgtagctcatcagcactttactgaaacggtcgatacggctgttgctgctgcgtccatacggcgcacccgggaacgggttccacgggatcaggttgatcttacacggcgtatctttcagcagttccgccagttggtgcgcgtgttcagtgccgtcgttaacgtggtcaagcatcacgtattcaatagtgactcggccctgattggcgttggatttctccagataacggcgcaccgcagcaaggaacgtttcgatattgtactttttgttgatcggcacaatttcgtcacgaatttcgtcgttcggcgcgtgcagggaaattgccagtgcaacgtcgatcatatcgcccagtttatccagcgccggaactacaccggaagtggaaagcgtgacgcgacgtttagacaggccaaaaccgaaatcatcaagcatgatttccatcgccggaacgacgttgttcaggttgagcagcggctcgcccatgcccatcatcactacgttagtgatcggacgctgaccggtgacttttgctgcgccgacgattttcgccgcacgccacacctggccgataatttcgctcacccgcaggttgcggttaaagccctgctgggcggtggaacagaatttacactccagcgcacaccccacctggctagagacgcagagcgtggcacggtcgtcttccgggatatacaccgtttcgacgcgctgatcgccaacggcgatcgcccatttaatggtgccgtcagaactacgctgttcttcaaccacttccggtgcgcggatttccgccacctctttcagtttgccgcgcaacactttgttgatgtcggtcatctcatcaaagttgtcgcagcaatagtgatacatccacttcatcacctgatcggcgcggaagggtttttcacctaaatctttaaaaaactcccgcatctgctgacggttgagatccagcaggttgatttttccatctttcgtggtgacgttttcaggtgtgactaattgttcagacatatgctattccggcctcgttattacacgttatggcccctggagggttgaaaaaagaaacgccccggtgagcggctgctcgtccgggggcgctgcattgtacaaattctggcgcacggatgccacgtttgcacgcggcatttacgaaattattaacgggtgcgcgggcacacttcgccttcgccaaagaaataagcgatttcgcgagcggcagattcgacggaatcagaaccgtgggtaccgttttcggtcaggctgtcagcgtaatcagcgcgcagagtaccagccagtgcgtttgccggattggtcgcgcccagcagatcgcggtgacgctgaacggcgttttcaccttccagcacggaaaccacgatcgggccagaggtcatgaattcaaccagaccatcaaagaacggttttccatcgtgttcagcataaaagccacgtgcctgttcaacggtcaggtgcagcattttggtgccaacaattttgaaccctgcagcttcaaagcgcgcaaagatattaccaatgacgttttttgctaccgcgttcggtttgatgatggaaaaagtacgttcaatagccatttttacctctgtaaattgttctgttgttgtctgtaccagcgtacgagatggcgcggattataatgagcaacagggccgttgactattgatgaaggtaacatttttttaaaataaaatgagttttagcaacaatcagggacaaaacagattattgcatgacaaatttcactgtcgcgatttgccccacgtcatccatcaccagcaattgataatcacctttatccgtcaaatgcagggtcacgttgcgcccgcgttcagttaacggttcgccattcagaaaccaccagcgttcacctgcccctccactactttgcaacggcaaagtcgcttccgctgcgcccggtaaacgtttaataatcgcgccatcgcgaacgcctgtcagctgcagcgggagctgggcatcgtgaccgtatggcgggcaacttgtgctggccggtggtaagcgcacagcgcgacgttcacttgcgggcagccagggttccagcggtagcggccagacatttatcatttcttgtcgcgcttgcgggcaatcagcggcaacacgtttgccattttcatccagccagatggggaaacgaatgccattaatgccttcctgctccggcagtaatagagttggcggctgactcccgtccagcagccaggttgccaggcggcggcgacagttaccgtcaccttccggcaaagactgtccgcccggccagcagataacgccacgagtgacactgttcgggcgcgggtcttccggcagattcgcactgcggctcagtaagatattattgacctgattcaacaatggtacggcactggcaaagccaaactgaccaacaacgggcgtgccgtccggtctgccagtccagatcccaatgacatagcgagcgttaaccccaatcgcccaggcgtcacgatagccatagctggtgcccgttttccatgccagtggggcgacgcgcggcaaggcactatccggcaagggttgcgcttcatcagccataatccggcgaatgatccacgccgccccgctgctcattaaaggccgttcaagcagcggatcgtcaggctgtaagcgcaatttgcctgccttgccgtggcgagcaaacgcggtatacgctgccgccatatcttccagttttgcaccagcgccgccgagaatgagactaagattcggcgcagcaccgttgggcaaatataacggcaatccaacattgcgtaactttgccgcaaaccgtttcggtccataggcttccagcacctgcacagcaggtaagttcaggctgcgcaccagcgcctcgctcatgctgatcgggccatgaaaaccgctatcaaagttacctggtcgataatcaccggtgcgccgggggacgtcttgcagcagacttgccgggtggatcaagccttcatccagcgccagaccataaacaaacggtttgagcacacttcctgggcttcggatgctattgaccatatcaacatgaccaaagcgactatcatcgttgagatcaacgcttcccacccagccgcgaacacgcatatcggtatgatcaaccacgatcatcgccagactgctgcgcggtggcaaccgccctttccagttttgcgccagttcttccagacgtcgttgaagaccggcatccaacgtagtagtgattttgtcgcttttgcttttaccgagcatcatgcggctaaacagcggtgccagttgcggcatttgtcggggggccagccagatgggttcttccctactctcttttacctgctcacgggaccacacaccttgcacggccatccgttcgagcactttattacgcgcggcttcggcacgctccggccaacgatccgggcgaagacggctgggcgcttgcggcaaaaccgccagcattgccgcctcggaatagcttaaattcgcagggctttttccgagataagcccaacttgccgcaccgatcccctgcaacgtaccgccaaacggagcgcggttaagatacaaggtcagaatttcacgcttagacagatgccattccagttgcaacgcgcgccagagctggcgaattttgccgccaaatgttttggggtgaggatcaagcagacgagcaacctgcatagtgagcgtgctgccaccggaaataacccgtccgctagtgagatcttgccatgctgcgcgcgccacgctgaatggattcacccccggatgcttccagaaccagcgatcttcataattgatcagcgcttcaaggtaacgtggagaaacatcttcgattgttaccggataacgccagatgccgtcagcatcggcgaagcgccagagcggcgtaccatcctgcgccacgaccactcgtgcgggattgacttcatgcagcggtagaggccagagtttatctgctccccacgctgcaagaaaaaggagaaagggcgcggctgccaacgttatccagcagccgcgtttggttaacaagcgaggcatttacggtctgacaatcagcagatcttcagccgcgccggtcgcccgccattggggaacatacatactttccaccatcggttgcggtacctgatacgttcccggcgtcaccgcccgcgccagatacaccagcgttaccggttggtattcatcaacggcaaccgccgccacaaagcgatcgtcacggaactcaatgtgcttaatgctcgcctgctgcatctggttcagtaagttctgcacttcgccaccactttgctccaggctggcgctaccgttcgccagattctggttttccagttccagacccgcaggcagcagatccacgactaacgcatccggcacgctgttactggcttttacctgcaaccacaccagcaccagatcgccgctacgtaagctgtccaggcttttgctcttaccatcagtaccaagaatatgacgctcgatttgcagcacattgttcgccggtaaaggtgcggattgcggataaccgctggcatccatacgcaaccataacggctgatcgccactgttgctcacctgcaaggtgacaagttgatcgctattcagattgctgttttgcgctttctcgcctgtcagctgctcagcactgaaagaggtttgcgcctgccatttaccgggtaaatcctgaatcgtacgggcagccaggaacaacgcgttactttcctgcgtgcttagccagcgttcaccaaacgcctgctggctaagtgtgttcagcaaagtgtactgctcatcgggtagcagtttattttcttccagcaaggagagcattaacgcgttgtcgcgcagactactaccgtaatcacccagccatatccgctcatcactattacgcggcgttttcagcgccagcgcaatcgcttcttcaccacgcgtcgcatcacccatggttttcagcgcaacgccaagttgcagcagcggtaaaccagaagcggcatctgcacgatgctcccagatttcacgcagcgcacccagcggagccttttgctgacgggccaacaccagcgcagcgtaagactgtacggcgaatttactggctttgagattatccgcgtacgggatgctcatcatgcccggatcttgtaaatagcgcagcagacgctcattaccccggttaatggcgtctgtcggcacgctgtaaccctgttcgcctgcgcggaccaggaaatccatcacgtaagccgtcagccagtactcttcgtcaccgtttttatcccacagcgcaaagccgccgttatcacgttgcatttgcagcaaacgggaaatgccgatatcgacgcttgcacggcgtttctcatcactgtcgcctttgatgcccaacgcctgcagttgggctgcgttggtataaagactcggaaacaggccgctggcggtttgctcaagacagccgtacggatacgcttttaactctttgatataacgtgcgatgttcagcggtggtttgccgctcaacaacaattgcccttccagcgtaacagggctgaagttttgcaatccatccgccggaatcgcccatgtctcaccaggctgtaacgccgtaccgtaattaaccgtttgtgccgggaacgccggacggacgccgattttccactgcttatgctgatcggcaacggtttcacccggtaacgctaacccgctaatggtggcctgaatttctccatcgccataacccggcaatgctcgcaccgggataaacagcgtagtacgcacacctggcgctaattcaacggctgcgggactatcgctgaccagttcaagcaaaccactggcggtcagggcaacgttcagtttttgcggtttatcggtaagattagtgatatccagcgtcagacggctggtatcgccactcgccataaagcgcggcatgttcagttcagcaatcaccggtgcggcaactatcactttactttcgttgctaccgaagtcatctgccgtccaggcttgcgccatgacgcgcaattcaccgttaaaatcgccaatcggcagtgtaacgctgccttcgccctgttcgttgagcgttaccggcagcgcctgctgcacgacaatattgacgtgattgaccggcggtttaccaccacgtttcagctcatcaccatcgccaccgaaacgcagagctgccagacgcccctgaccttcaataacctgaccgtaaatatcgtaaatgtctgcgccatagcgtttctgaccaaagaacgcctgccacggatctggcgtgacgtagtcagtaatattcagcacaccactatcaacggcagacaccagcacattcacctgtttaggcttctcgccatttttagtgctggctttaattttcacggttaatggttgattgggacgcatttttgctggtgtttccagcgccagatcgaggcgacggttttcatcgccaagcggcagatgcaacacaccaaccgcgcgttttggcgtcgcggagcgagatttatcgccaggacgtaccaccagcgtacttaaatacagatcatgacgattccaggttttatcgaccggaatcgtcagatccagcccttgagcccgaacatcaatctcttgccaccacagcggcccttcactggactcgaccatcgcataacctttacccgccgttggcgcggcgatatgcaacttaatggtgtcgccagggcgataactggctttatccagtttcagcgtgacacggtcgggtcgcactgcgccgctaccgtcgctgttgtcctgccagctatagccagcccagaaacgaacactactgaccgcttcattcggcgctttgacttccagacgataagcgccccactctaccggaaaactgaccttgccggtttcgtccgctttcagatccagagtttgttcattttcgatcagatctttttgatcaaactgactctgccagccttcatcttcactccagttccagtagtaatcgcggcgttcgcgaatcaggcgcacctgcaagccgctcacggcttttttcacgccttgcgcatcgctataaacgatgtcaaaagcggcgttactgccttcatcaacaatgggctgtttcaccgtgctgtcagtacgataatcgtaaacgcttttgctggcgaactgcggacggatccccggcaatgcatcggcaggccagatagcctgctcagcgcggcgcgtcaccgggcgaccgccgctttccagcaaactaccctggaaaataacctgtaatggggaatgcgtttccttccactggctttctgtagaaacttcgccgcgccctttatcatccagcgtcaactgaacttcatccagcgtgcgggaaagattttcggcagctatatcgccgaattcaaaaccaggtaaggcactcacagcttcacgcagtgggcgcaggaaaagttgcccttgcaaagtattaccattagcaggtgcaccatacaggtagtaccccaccacggagaatttcacttcatctttcggcgttagcggggttttctcaccggtcagattcagcgccatgcgctctggcataaaatcttcgacgtggaaatcccacatccgatactgattatcgcccgtgttagcgcgaatatgccacataccggttgccgcattgctatcgagtggccaggtaaagtggtagaggccattctccggctgactaacgacgctcctgagtacctgcccatcgggtttaatcacgtctaacttgatgggttgattgggcaacgctttaccgtctgcatcacgcagcaaaccattgaggattaccgtttcacctgggcgataaagatcgcgtgggccaaacatgaaaaactgtttgctatagcctggcgcgccagcaatgttaaattctgctaagtccagcgccggaagttttaaatcgagtagcgttgtctgaccgtctttacgcgccaacagtaatgccgcgtttttatcattttccagctgcacatgcccctgagcgtcactggttgcctgagtcagagtctgccctttctcatttaataaagagacttcaattccttgctgggccgcgccgttttccagactttgggtaaagatatccagacgattgtgataacggtgagcactaacgccgatatcacttaacgtaaacagcgtcgcgggattactgtaatcgtaacgtccagcctgattcatcacagccagatacacgcccgcctgctgaagcggtttgatatcgcccagcggcagcaataatttttcacgggtgttacgcgcaggattgagatcaaaccgtccggtgtagaccagatccgccatctgcagcagtttgtcactctgccagttcgccaggctattgcggtattcccattggctaatgaatgctggcagagattctggcttaacgcggaagaagttaacatcgacattattaacgttgagcgccattaccggcagcccttcaacgactttgccaggcagcaggctaccacggctggcaaaaccgacgctgggttggatgtcgcgggtagttatagttttttcgtaatctttactgaaggttgcgttgttgagtgctttgacctccttgccaatagtaacgatcaaatcacgtttcggttcgaggtggcgtaaacgtaactctttaagattatcactcagctcccaggcaccatccactttgccgctttttttatcgacgacatgaataacgcgactgaaatcctgatccgggtcgagagggatggagaacgtcagcaccagcgtggctgcaccatcaagttggacttcagagagatccagcaatgtcagcaccttaccggcactctgttgggccagtttttgtctctccggcacggagagttttgcactactcgcgttttcactagaggccgctttagtaacttcagaaggcgcatcttttttcaccgctgttggcgcgttatcgttgttgtcgcaccctgccagcgccagcattagcatgcaggcggctacgcgtaactttttcatttttcatccctgccacaatggcccgttagcaacgtcgaataattattatgcgtgagaatttacgttatgtaattcagtatcacgcccatacaatccgaattttagtgagaattgtggctcagacagccaaatcagcctcttttgcttgtcgcttttcactaaacatccgacaatttagcctaaccccggcaaaaatggagatgcctatgtccacgacatggtttgtaggagccgactggctcgccgaacatattgatgacccggaaattcagattatcgatgcccgcatggcgagccctggacaggaggatcgtaacgttgctcaggagtatctgaatggacatattcccggcgcagtgttttttgatatcgaagcgctttctgatcacacttccccgcttccgcacatgctgccgcgcccggaaacgttcgccgtggcgatgcgtgaattaggcgttaaccaggataagcacctgattgtctatgacgaaggtaatcttttcagtgccccacgagcatggtggatgctgcgcacctttggtgtagagaaagtgagcattctggggggtggacttgcaggctggcagcgcgatgatctgctgttagaagaaggtgcagtagagctgccggaaggagagtttaacgccgcgtttaatcctgaagccgtggtgaaagtaaccgatgtattattggcaagccatgaaaatacggcgcaaattattgatgcccgcccggctgcacgttttaacgcagaagttgatgaacctcgcccaggtttacgtcgcggacatattcccggagcactgaatgttccgtggacggaactggtgcgcgaaggcgaactaaaaacgaccgatgaactggatgcgatattttttggtcgcggcgtcagctacgacaaaccaattatcgtcagctgcggctctggtgtaacggcagccgtggttttgttagcactcgcgacgctggatgtgccaaacgtgaaactgtacgacggcgcatggagtgaatggggcgcgcgggcagatttaccggttgagccagtgaaataagtattttacaggcaataaaaaaccgccgaatttggcggttttttattgctagtctggttcgcggcctttccagcaggttgacttgtgttacatgagcaacgcaggtgcttcacagcaaaacaatactcaccagtaactctctttttgtcaagcaaaagagagtaattattgtttatttagcgtattatcgacaccggccctttccgccgtgttcggtaataaaataacctggcttattagtccgaattcagacaaatataaataaatcctgctcaaaattaaaaattctaaccggtaaaagatattacttaaacatgtaaattcactttcctttaaaaaacaaaaaaccgccaaaatcaggcggttttttgttgctggtccggttcgcggcctttccagcaggttgtattaccgtagtaatgcaagcgcgtctcagcggagacaatactcgccagtaactctctttttgtcaagcaaaagagagttattattgttctgttagtgtattatccactgcggccctttccgccgtctcgcaaacgggcgctggctttaggaaaggatgttccgtggccgtaaatgcaggtgtttcacagcgcttgctatcgcggcaatatcgccagtggtgctgtcgtgatgcggtcttcgcatggaccgcacaatgaagatacggtgcttttgtatcgtacttattgtttctggtgcgctgttaaccgaggtaaataataaccggagtctctccggcgacaatttactggtggttaacaaccttcagagcagcaagtaagcccgaatgccgccctttgggcggcatattttagattatccgattctgtttaaagtcacgcaaaaaaccaccccagcgacgttcatagaatggcgcaatatgttcggtaataaagtggctaattcctttttccccttttttcacctgacaaatatcgattggttcatcgccaggtaatgtatcggtcgctacacttcccgtcgcctgaataatttcttcgatatcaccatcggcttcaatgccaataagtaaattaggctgtgcctcttcgttctctttaatactacaaataaaagcacgcttcaccggcttaatggttttaaataaggtggtgagactatcaatcatttgtgctggcggctctgcgacttcgcttaatatcaggctttcaccgccttccaggatttcctggctgctcagcggatttccctcttcaccaatcaacaaactgatttcacgcggcataaattctttaccggttggcagtttggcattaaggaagagcgtttcgccaagtgtcatctcaaacagcgtgcgaacgggcattacgacaaatgcctgttcgtcttcaaccgcctgttgaagtgcttctaagctggtgaaaaaaggaatgacgctggtgccgtcttctttttcccagtgctgtaaatcaagcgcgctatcttcaaccacagcctcgccctgcgccgccgtaccaggcacccagacggtggattccagtagagtacggaaaaaggccgggcggtgcgccggttcagttgctgctttttccagcaggtcttcaagttcgttttttgtttcggacataagaaccacaattcattcaacgttcggggcgcaaatgcctgatgcgctacgcttatcaggcctacaagggattcgcaatttgttgaatttgcagaatttgtaggccggataaggcgtttacgccgcatccggcatattagtttacgccgttaacagattagctatcgtgcgcacaccaagtcccgtagcgcccgcagaccactgttcaaccggcgctttacggtaagtcgcgctgcagtcgatatgcagccagccttgctgatagttctcaacaaagtggctcaggaagcccgccgccgtgctcgcgcctgccggatacgccgcgcttccggtattgttcagttcggcaaagttagacggcagctggctgcggtggaactccgccagcggcagacgccagaacggttcgttctcctgcgcggcactcgccagcaagcgaccggccagcgcatcgtcaaaactgaacagcgcgtgataatcattacccagcgcagttttcgccgccccggtgagggtcgccgcatcaatgatcatttccggtttctgcgcactggcatcaatcagaccatcggcaagcaccagacgcccttcggcatcagtgttcatcacttcaacttttttaccgttgcgataggtgatgatatcgcccagcttgaacgcattgccgctaatcaggttatccgcacagcagaggaacagcttcacgcgcttgttcagtccgcgcgtaatggcaaatgccagcgccccggtaaccgttgccgcgccgcccatgtcgctcttcatgctgtccataaacgcagtctgtttgatgctgtagccgccggagtcaaaagtgatacctttacctaccaggcacgcgtacactggcgcttctttatcgccagttgggttgtaatccagcgccagcaataccggagaacgttcactaccgcgtccgactgtgtgcagccccatataaccttgctcacgcagatcttcgcctttggtgatccgataagtcacacgatcgcccgcgacgttgctgatcagatcaacagcacgctgtgccagttggcttggtcccaattcttctgccggtgcgttgatggtgtcacgcacccagtcgatgatcatcaggcggttatccagttcctggcgctgggcatcgtccagatccggccacaccactttacgcgtgcctttcggggctttgtaaccttgccagaatgcccagcagcgatccgcatcccagccttcaccgcttaactgaacatgcttgatgcccagaccgtcaatcttgcgcgccgcacgctggatcagccccagatcgtctgccccgttcaaatgcagggtaatgccgtcattattaatgctgtaagttgctttttctccccagcgcgcgtcggcaggttgggtagagagggtaatcttcatcgcttctgtcattttagttatccttctttgtaaaagggccgccagttggcagccccaggatttttccgctaaatgattcgcgttgcaggaaggcggcaagtgagtgaagccccaggagcatagataactatgtgactggggtgaacgagcgcagccaacgcatctgcggcgtgaagcatgacgcggaaattattcggcctcgtccagccagactaacaaaatcgcttcgaggattttctcgttggatgcctgcgggtcgtcgtcgaaatcttccagatcgcaaatccactgatgcatatcggtgaatcgaaccgttttcggatcaagatcgggatacgcatcgtacagtgcttcgccaatttcgcggctatcggtccacttaagtcccatactaacctctgttaatgctcacgcgcatggttgatagtgtaacgcgggatttcgactactaaatcttcgtcggtaacgcgcgcctggcagcttaaacggctttccggctccagtccccaggctttgtccagcatgtcgtcttcctgctcactgctttccggcagactgtcaaaaccttcacgaacgatgcagtggcaggtggtgcaagcacaggatttttcacaggcgtgttcaatctcgataccgttacgcagagctgcgtcgagaatggtttcaccgctattagcttccagaacagcgccatcagggcagagatcctgatgaggcaaaataacaatctttggcatattaaacctcgtccacggaatggcctttcagcgcacgacgaacgctctggtccatgcggcgagcggcgaaatcctgggtttgtttgtctacgtttttaatcgcttgttcgatggcgtcaacatcatcgccctgcgccacttcactcaggtgagcggcagcatcgtcaatgacctgacgttctgcggcgcttaacagcgcggcatcagcagccagcgcgccgtgcagactttccagcacacgcgccgcttctactttttgttctgccagcattcgggcttttacgtcctgctcggcatagctcatactgtctttgatcatgctagcgatttcgctatcggtcagaccgtaagacggtttgacctgaatagacgcctcaacgccggtggatttctccatcgccgtcacgctcaaaagaccgtcggcatcgacctggaacgtcacgcgaatatgcgcaccgccagccggtagcgccggaataccacgcagcgcaaaacgcgccagactgcggcagtcctgcaccagttcgcgctcaccctgcattacatggatagacatcgccgtctgaccatctttaaaggtggtgaaatcctgagcgcgggccaccggaatagtggtattacgcggaatcactttctccaccaggccgcccatcgtttcgaggcccaggctcagtgggatcacatcaagcaacagcatttcgctgtctggcttgttacccaccagaatatccgcctgaatcgccgcgccaatagcgacgactttatccgggtcgatggaagtcagcggtggacgaccgaaaaattcgcctacccgttcacgcaccagcggcacgcgagtagaaccgcccaccatcaccacttccagcacttcatcagcttctacacccgcgtctttcagcgcgcgacgacaagccagtaaggttcgttttaccagtggcgcgatcagttcattgaattgttcacggctgatttcgccctgccagcccgcaacgttaacggtcacggagtccgcatcgctcagcgcgattttggctgcaatggcggcatccagcagttcacgctgaacgcggttatcgctacgatcaggaatgcccgcctgctcgcgaatgtaatccgccagcagatggtcgaaatcatcgccgccgagcgcggaatcaccgccggttgccagcacttcaaacacgccgcgacttaagcgcagaatggaaatatcaaacgtcccgccaccgaggtcataaacggcgatcacgccttcctgaccggaatccagcccgtaggcgatagccgcagcggtcggttcgttaagtaagcgcaggacgtgaaggcccgccagacgcgccgcgtctttggtgccctgacgctgggcatcgtcaaagtacgccggaacggtgataactacaccatccagctcgcctgccagggcttcagttgcccgcgccgccagtgctttgaggatgtccgcagaaacgcgcaccgggttcagcagccccgccgccgtttcaatcatcggcaggccgttttcgctggcctggaattgataaggcagatgcggatagcgttgctggatatcagccaggctgcgtcccatcaggcgtttaacagaactaattgtgttggcggtatcgagcgctgcattagtacgcgcgtcataacccacgctatgcccttgctgttgatagtgaacaacagatggcagcaggtgacggccttcatgatcggctaacgtttcggcctgaccgctgcgcactgtcgccaccaggctgttggttgtgcccaggtcaataccggccgccagacgacgctgatgcggcgcagcactcaaaccaggttcactaatttgtaataaggccatgtttagcttccagaaattaaaaatcgagcagtttttcttcgagttgttcggcactgcttcgcagtttatcgagaaaacgcagcttacgcacggtatccgccgccgcgtcccacgtctcgttgtctaactgttcaaccatcaactgatggcgggtatcaaacatctttttcacacgtttgataaagctttccagccgcgcttcatctttcgcctgttcgatctcgtccagctcttcgcgcagctccaactgttccatcaggaacgcggtgtcgcgcacagtatgctgctcgctggcgagatcaaagccgtgcaaagaaagcaaatattccgcgcgcattaacggatgacgcagcgtttgccaggcctggttaatggttgcagattgctgtacggcggcgagttgttccgcctggcttccgctggcgaatttatcaggatgatactgacgttgtagatcctgaaaacgcaggctcagcgcctgggtatcgagttgatagcgggcaggcaagccaaagagggtgaagtaatccataacattctcagggctgcgatccgccgcgataacggcgaatcaggtaaaacaaaccccacgcgcaggcgaccacggtggggttatcggtatgcgcatcaaacgtggaagctttcgccgcaaccacactcatctttgacgttcgggttggtgaatttaaacccttcgttcaggccttcttttacgaagtccagctgcgtaccgtccagaaattgcaggctcttgccatcgaccacgactttcacgcctttgtcttcaaacacgatgtcttccggcgtcggttcgtcaacaaattccagtacataagccataccactacacccggaggttctcacgcccagacgcaggccaaaccctttaccgcggttagccagaaaggtatttactcgcgctgctgcactgtcgctcagtgtaatgctcataaccaaacctcaactcttattttgcttcacgtttgcttttatagtccgcaatggcggctttgatcgcgtcttctgccagaatagaacagtgaattttcaccggcggcagttcaagttcttcagcaatatcggtgtttttgatcgcctgcgcttcgtcgagagacttccctttcacccattcggtgaccagggagctggaagcgatagcggaaccgcagccgtaagttttaaaacgcgcgtcttcaatgataccttcatcgttgactttaatctgcaacttcatcacgtcgccacaggccggtgcccccaccatgccgctgccgacgttctcgtcgttgttgtcaaaggaacccacgttacgcggattctcgtaatggtcgataactttttcgctgtaagccattataaattctcctgattccgataccgattaatgatgagcccattcgatgctgttcagatccacgccctgcttgtacatttcccacagcggagaaaggtcacgcagacgaccgatggatttacgaactaactcgatggtgtagtcgatctcttcttcagtagtaaaacgacctaaagagaaacggatagagctatgtgccagctcgtcgttcagccccagcgcgcgcagcacgtaggacggttcgaggcttgcactcgtacaggcggaaccactagaaactgcgaggtctttcagcgccataatcaggctctcaccttcaacgtagttgaagctgacgttgagaatgttcggcgcaccgtgttccaggtcaccgttcaggtaaacttcttcgatatctttgatgccgttccacagacggttacgcaggccgcgcagacgttccatctcggtcgccatctcttcttttgcgatgcgataggcctcgcccattccgacgatctggtgaacaggcagagtgccggaacgcataccgcgctcgtgaccgccgccgtgcatttgcgcttcgatgcgtacgcgcggtttacgacgtacatacagcgcaccgatacctttcgggccatagattttgtgaccggagaaagacatcaggtcaactttcaactggctcaggtcgataggcagtttacccacgctctgggttgcatcaacgtgatagataatgccacgagcacggcacatttcgccgatagccgcgatatcctgcaccacgccgatttcgttatttacgtgcatgatggacacgaggatggtgtcgtcacgcatcgctgcttcaagttctttcaggtcgataatgccgttacgctgcggtgccaggtaggtgacttcaaaaccttcgcgctccagctgacggcaggtatccagtaccgctttgtgttcggttttgctggtgatgatgtgcttgccttttttctgataaaagttggctgcacctttgatcgccaggttgtcagattcggttgcaccagaggtaaagacgatttcacgcggatcagcgccgaccagatcggcaatctgattacgggcgatatctaccgcttcttcagcctgccagccgaaacggtgagaacgggaggccgggttaccaaaggttccgtccatcgtcataaactgcatcattttctcggcaacacgcgggtccaccggcgtggttgcggagtagtcgagataaatcggtaatttcattgctctataaactccgtacatcactcaatgcaaggaatcaggctaccggctggatgtacgaccgtgtttacggagtatttagcactccggcctgattctgaattctttttattaagcgcgtaacttaacgtcgatcgcgtcttgtgtgcgggtgcgtggcgcgtcgtgagtatgctgacgaccagacacatccagcacttcctggttattaaccagttcgcctaaagtaatgttgttgagaaaaccggtgagacggtcgctcaaatcacgccacagcgcgtgggtcaggcatttatcgccgccctggcagccgcctttaccctgacaacgggtggcatctacagattcgtcaacggcgctaattacttcgccaacggcgatgctgctggcatctttgcctaacagataaccaccgcctggtccacgtacgctggaaaccagaccatttttacgcagacgggaaaacagttgttccagataagaaagggaaattccctgacgttcggaaatatcagccaacggtaccgggcccgcttcagagttgagcgcaacgtcaagcattgcggtcacggcatagcgccctttagatgtcagtctcatgtcttacttcacctcaaactcgcccctgcccggggttttttattgtaaaagtgggggtattgcatagcagggtcaagtctgacattcccgagtaaattggtcaactatttacttgactgatttagtcgggtatttaaccttcagtgccatttttttatcgtggcgtttgtacctgttgtcggatgcggcgtgaacgccatatccgccctggggttctgtacactgtaggcctgataagacgcattacgcgtcgcatcaggcaacggctgtcggatgcggcgtgaacgccttatccgacctacggttctgttcactgtaggcctgataagacgcattacgcgtcgcatcaggcaacggctgtcggatgcggcgtgaacgccttatccgacctacggttctgttcactgtaggcctgataagacgcattacgcgtcgcatcaggcaacggctgttattcggccttgttacctttattctgctgctcaatagaagccagaatcccgcgcaggatattcaactcctggctttccgggcgcgcacgggtaaacagacggcgcaatttattcatcacctgccccggatggttttcacggataaaaccggttgccagcagcgtttgttccagatgaccataaaaacgctccagatcatcgaccagcggatacggcgtctcttcatgctcgacctgctcgccgttttcctgagttgccagccaggccatgcgcacttcataggcaataacctgaaccgccatcgccaggttcaggctgctgtattccgggttagccgcaatcgcgacatgataatggcatttctgcaactcttcattggtcaagccgacgcgctcgcgaccaaacaccagcgccaccggggtatttgccgcttcagcgacgcttttcaggccgcattcgcgcgggtcgagcatcggccatggcagcgtgcgggaacgtgcgctggtgcccaccaccaggctacaaccggctaacgcttcgtcgagcgtatcgacgatgtgagcattaccaatcacatcgctggcccctgctgccagggcaatcgcctgggagtcgggtttcaccagtggattaaccagccacagattggttaatcccattgttttcatggcacgggcaacagaacccatattgccggtgtgactcgtctccaccagcacaattcgaatattttgcagcattgtctttcttcatctaaagattattcacgcatcttatcataaaacgaagacagatgccgatctcgctgctatactctgcgccgttttcccgttctttaacatccagtgagagagaccgatgcatccgatgctgaacatcgccgtgcgcgcagcgcgcaaggcgggtaatttaattgccaaaaactatgaaaccccggacgctgtagaagcgagccagaaaggcagtaacgatttcgtgaccaacgtagataaagctgccgaagcggtgattatcgacacgattcgtaaatcttacccacagcacaccatcatcaccgaagaaagcggtgaacttgaaggtactgatcaggatgttcaatgggttatcgatccactggatggcactaccaactttatcaaacgtctgccgcacttcgcggtatctatcgctgttcgtatcaaaggccgcaccgaagttgctgtggtatacgatcctatgcgtaacgaactgttcaccgccactcgcggtcagggcgcacagctgaacggctaccgactgcgcggcagcaccgctcgcgatctcgacggtactattctggcgaccggcttcccgttcaaagcaaaacagtacgccactacctacatcaacatcgtcggcaaactgttcaacgaatgtgcagacttccgtcgtaccggttctgcggcgctggatctggcttacgtcgctgcgggtcgtgttgacggtttctttgaaatcggtctgcgcccgtgggacttcgccgcaggcgagctgctggttcgtgaagcgggcggcatcgtcagcgacttcaccggtggtcataactacatgctgaccggtaacatcgttgctggtaacccgcgcgttgttaaagccatgctggcgaacatgcgtgacgagttaagcgacgctctgaagcgttaatgactcaggcgggtgatatcactcacccgccctcgcctttcaggcgctattccgaaatacttcctcactgctttactttctttcgtcactctcccaccatctttccccgattaatggatgataaagaagagccaaggaaaggttatggcactgccagtgaacaaacgcgttcccaaaattctgtttattctctttgttgttgccttctgcgtttatttagtgccgcgcgttgccatcaacttcttctattatcccgacgataaaatttacggtcccgatccctggagcgcggaatccgtcgaatttacggctaaggacggtactcgtctgcaaggctggtttatcccttctagcacgggccctgctgacaacgccatcgcaaccatcattcatgctcacggcaatgccggaaatatgtccgcccactggccgctggtcagttggttacccgagcgtaatttcaacgtttttatgtttgattatcgcgggtttggtaaaagtaaaggcacgccgtcccaggccggattgctggacgatacgcaaagtgccatcaatgtggtgcgccatcgcagtgatgtaaacccacaacgtctggtgctgttcgggcagagtattggcggggcgaatattctggatgttattggtcggggtgatcgtgaaggcatacgtgcggtgatcctcgactccacatttgcctcttatgcaaccatcgccaaccaaatgatccccggcagtggctacttacttgatgagagttacagcggcgaaaattatatcgccagcgtcagcccgatcccgcttttactcattcacggtaaagctgatcacgttatcccatggcagcacagcgaaaagttgtatagcctggcaaaagagccaaaacggttgatcctaatcccggatggcgaacacattgatgctttttccgatcgtcacggcgatgtttatcgcgaacagatggtggactttatccttagcgcgttgaatccgcagaactaacccatgatcgctagcacgataatcattcacaaaaccaccttaagacatgctaatccactggtcagaacagtttaagatgagaaaaattctgtgacgcttgccaacatttctgatgattagcattcccttcgccatttccttgagcaaactttagctattcttatcaattatgcttatgggagatctacagatgatgcctacgcttgctccaccatctgtccttagcgctccccagcgccgctgccagatcttgctgacgctctttcagccggggttgaccgccaccatggcaaccttcagcgagcttaatggtgtggatgatgatattgccagtcttgatatcagcgaaacaggacgggagatcctgcgctatcatcaactcacactgacgactggttatgacggtagctaccgggttgaaggtacagtgcttaaccaacgtttgtgtttatttcactggctacgacgtggtttccgtctgtgtccgagttttattaccagccaattcacccccgccctgaagagtgaactgaagcggcgcggaattgcgcgtaacttttacgacgataccaatctacaagcgttagtgaatctctgctcccgacggctgcaaaaacgctttgaaagccgcgatattcatttcctgtgtctgtatctgcaatattgtttgctgcagcaccacgctggaattacgcctcagtttaatccgctccaacgtcgctgggcggaatcctgccttgaatttcaggtagcgcaggaaattggacgccactggcagcgtcgggcgctccagcctgtaccacctgatgagccactgtttatggcactacttttttccatgttgcgggttcccgatccattgcgggatgcgcatcagcgggacagacaattgcgtcagtctatcaaacgtctggtaaaccattttcgtgagctgggaaatgttcgtttttatgatgaacaggggttatgtgatcagctttatacccacctcgcccaggcgttaaatcgcagtttgtttgccatcggtattgataataccctgccggaagagttcgccagactgtacccacgcctggtgcgcaccacccgcgcggcgctggccggatttgaaagtgaatacggcgtccatctttctgatgaggaaagtggtctggtcgcggtgattttcggtgcctggctaatgcaggaaaacgatctgcatgaaaaacagattattcttcttaccgggaatgatagcgagcgagaagcgcagattgagcagcagttacgcgaactaacgttactgccgctcaacattaagcatatgagcgtaaaggcatttttgcagacaggcgctccgcgtggcgcggcactgattattgcgccttataccatgccattaccgctctttagtccaccgctgatctatacggacctgacgctgacaacacatcaacaggagcagatccgcaaaatgctcgaaagtgcatgatcagcaactgggaacaactttcgggcgcaaaaacattgccggaagcgccaccagcgccattacccagaacacgccgtggcccagatattgatacaggaaaccggcgaaaacggtcatgatagcgatactgccgcccatcgcgacggcagagtaaaccgcctgtaaacggatgacttcgctaccctggcgagcagcaatataacgcatggcggccaggtggcagaccgtgaaggtgccgcaatgcagaatttgcaccactatcaaccacggcaacgccgtagttgctcccataatgccccagcgcactacgccgcaaatcgcgctgatcaacagcatatcgcgtgcactacaacggcggaaaagtttattactcagcgcaaagataatgacttccgccaccacgcccaggctccacaaataccccaccgcgctggcgctgtagccagctgcctgccagtaaatggcgctaaaaccgtaataggccgcatgtgccccctgcaataaacaaacgcaggccagaaagcgccagttctggcgaaccagcgccaaccacgcagaccaaccggtgctctcctgctggcgacttgccccttgtggctgaatcgtcggacggatgagaaagccgagcagcatggatgccacgcccaacgtcaacagcgcgaggatcacccgataatcaaacatagtgaccagtttgcccgtcagcgcgctgccaatgacaaacgccacgctgccccacagtcgcactttgccgtaatcaagcgggaactgcttttgccacgtattcgccagtgcatcggtcaacggtaccagtggactgaaaaagaggttaaagccaatcatcaccagcatcagccacgctacgtgcgcccccgcccagaaggcgacagcaaagagaagtgtcagcagtgccagcacgcgcaaggcggaaatcaggcgggaaggatcgctgacgcggggcgcgatgagcaaactcccgaggaaacgggcaaccagacctgcccccaataacaggccgatggtttctggcgttaaaccaatccctttaagccagacgctccagaaaggtagaaaaatgccgtaactaaaaaagtatgtgaaatagccgagcgccaaccagcgcgtggattgcaaaaccatgagtccctcccgtcaggaggcgttagtctggggttaatcgaatgttggtgcaagttgaaaaataagaatattcgagcctgcttcccgatgtctgtaacgccagttcacaagcactaaaaaactgagatccgcgacgcatgttgcaaaaataatgcgtaattatgccgttacgcttgccaaacgttcctgcacaatggcgatgaaatcgcgtaatgccggcttcatctcccctttcttccacgccatcagtaaagcaatggaaggcacatttccggcaatgggacgaaaaacaacctgtccggtattaaaattattcatataaccgggtatcaaagtgacgcccagccccatgcccaccagattcatggtcaccagaatattcgttgccacctggacgatatttggctggctgttttcttgcgcaaaccacgctttaacgatcggcgcaaggctaccggaatacaccggatcggtactgacgaaattcacgccatccagttgcgcggcggtgatctctttttcatgtgctaaagggtgatcaaccggtaacacaaccactaatggttcgtcaaaaagctccagataatcaatctccgggctataaacaggatggcgcattaagccgacgtcgagttcaccacggcgaattttttcctcctgttgcgtggtgattaaactcaccagctcaatcaaggtgtctggctgtctgagacgaaacatcggtaatacttttggcagtaaattcacttccgcgcttggcacaaagccaatggttaattgtctgtcttcctgaacaattttccgcgcccgtaatttggcattttccgcttgttcgaggattgccagcgcgtcctggagaaaacattctcccgccgccgtcaacgcgactttgcgcttatccctcaccagtaacggaacaccgacacagttttcaagatcgcggatctggctgcttaagctaggctgactggtatgcagtttttccgccgcacgggtaaagttcagtgcctgcgccactgcgacgaaatagcgtaaatgccgtagttccatcaccttccccttgttatcgaaaaaacgtctcagctggtagaaattaactatttcacatattagcaaccaaccagcaacatccttatggcacaaaaatagaaggtcaatacatcttatctttcaggattaaaaaatatgaccacacccagtgatttgaacatttaccaactgattgacacccaaaatggtcgggtcactccgcgtatttataccgacccggatatttaccaactggagcttgagcgtattttcggtcgttgctggctatttctcgcccacgaaagccagatcccaaaacccggtgatttctttaacacctacatgggagaagatgcggttgtcgtagtgcgtcagaaagacggcagcatcaaggcgtttctcaaccaatgccgccaccgggccatgcgtgtgagttatgcagattgcggcaacactcgcgcctttacctgcccgtatcacggctggtcttatggcattaacggcgagttgatcgatgtaccgctggaacctcgcgcctacccacaagggttgtgtaaatcccactggggactaaacgaagttccttgtgtggagagttataaagggctaatttttggcaactgggataccagcgcaccgggcctgcgtgattacctgggtgacattgcctggtatctggatggcatgctggatcgtcgcgaaggcggcaccgaaattgtcggcggcgtacaaaagtgggtgatcaactgtaactggaaattcccggcagagcagttcgccagtgaccagtatcatgctctgttcagccatgcttctgccgttcaggtattaggggcgaaagatgatggcagcgataagcgcctcggtgatggacaaaccgcccgcccggtgtgggaaaccgccaaagatgcgctgcaatttggtcaggacggtcacggtagcggtttcttctttactgaaaaaccggatgctaatgtctgggtcgatggcgcagttagtagctattaccgcgaaacctatgccgaagcagaacaacgtttaggtgaagttcgcgccctgcgcctggcgggtcataacaatattttccccacgcttagttggctaaacggcactgccacactccgcgtctggcatccgcgcggccctgatcaagttgaagtgtgggcgttctgtattactgacaaagccgcctccgatgaagttaaagccgcttttgaaaacagcgccactcgtgcttttggtcctgctggttttctcgagcaggatgacagcgagaactggtgtgaaatccagaaattgcttaaaggccaccgcgcccgcaacagcaaactgtgtctggaaatggggcttggtcaggaaaagcgccgcgacgacggcattcctggcattactaactatatctttagtgaaactgccgctcgtggaatgtaccaacgctgggccgatcttctgagtagcgaaagctggcaggaagtgctcgataaaaccgccgcttaccagcaggaggtgatgaaatgagtgcgcaagttagtctagagttacatcaccgcattagccagtttctctttcacgaagccagcttactggacgactggaaatttcgtgactggctggcgcagctcgacgaagagattcgttacaccatgcgcaccacagttaacgcgcaaacacgcgaccgccgcaaaggcgtccagccaccgacaacctggatttttaatgacaccaaagaccagctggagcggcgaatcgcccgtctggaaacgggcatggcctgggcagaagagccgccgagtcgcacccgtcacttaatcagcaactgccagataagcgaaaccgacatcccaaacgtatttgctgtgcgggtaaattatctgctttatcgggcacaaaaagagcgcgatgaaacattctatgttggaacgcgtttcgacaaagttcgccgtctggaagatgacaactggcgcttgctggaacgggatatcgtcctggatcaagcggtaatcacttcccataacctgagtgtactgttctgatgaatcgaatttatgcgtgtcccgttgcggatgtgccggagggtgaggctctccggatcgataccagccccgtcatcgccctgttcaacgttggcggcgagttttatgccattaacgatcgttgcagccatggtaatgcgagtatgagtgaagggtatctggaagatgacgccacggtggagtgcccgctacacgccgccagtttttgcctgaaaacggggaaagcgttatgcctgcccgccaccgatccgctcaccacttatccagtacacgttgaaggtggtgacattttcatcgacttaccggaggcgcagccatgagcgatctgcataacgagtccatttttattaccggcggcggaagcggattagggctggcgctggtcgagcgatttatcgaagaaggcgcgcaggttgccacgctggaactgagcgcggcaaaagtcgccagtctgcgtcagcgatttggcgaacatattctggcggtggaaggtaacgtgacctgttatgccgattatcaacgcgcggtcgatcagatcctgactcgttccggcaagctggattgttttatcggcaatgcaggcatctgggatcacaatgccagtctggttaatactcccgcagagacgctcgaaaccggcttccacgagctgtttaacgtcaatgttctcggttacctgctgggcgcaaaagcctgcgctccggcgttaatcgccagtgaaggcagcatgattttcacactgagtaatgccgcctggtatcctggcggcggtggcccgctgtacaccgccagtaaacatgccgcaaccggacttattcgccaactggcttatgaactggcaccgaaagtgcgggtgaatggcgtcggcccgtgtggtatggccagcgacctgcgcggcccacaggcgctcgggcaaagtgaaaccagcataatgcagtctctgacgccggagaaaattgccgccattttaccgctgcaatttttcccgcaaccggcggattttacggggccgtatgtgatgttgacaagccggcgcaataatcgcgcattaagcggtgtgatgatcaacgctgatgcgggtttagcgattcgcggcattcgccacgtagcggctgggctggatctttaaggaagcacgatgaaagaaaaaacgatcattattgtcggtggcgggcaagcggcggcaatggctgcggccagcctacgccagcaagggttcaccggtgagctgcatctgttttccgatgagcgacatcttccttatgaacgacctccactcagcaaatccatgttgctggaagattccccgcagttacagcaggtgttacccgctaactggtggcaggaaaacaatgttcatctgcattccggtgtaaccatcaaaacgctgggtcgcgacacacgagagttagtgttaaccaacggcgaaagctggcactgggatcagctttttatagcaaccggcgcggcagctcgaccgctgccgttgcttgatgcactgggagaacgctgctttaccctacgccatgccggtgatgccgccagactgcgagaagttctgcagcccgaacggagtgtcgtgattatcggtgccggaactattggtctggaactggctgccagcgccacgcagcgcagatgtaaggtgacagtgattgaactggcggcaaccgtcatgggccgtaatgcaccaccgcccgtgcaacgctatcttttacagcgccaccagcaggctggtgtgcgcattctgctcaataatgccattgaacatgtggtcgatggtgaaaaagtagaactgacgctgcaaagtggggaaacgcttcaggctgatgtggtgatttacggtattggtatcagcgccaacgagcaactggctcgcgaggccaaccttgatactgccaatggcattgtcattgatgaggcttgccgcacctgcgatcccgcgatctttgccggtggcgatgtggcaatcactcgtcttgataatggtgcactacaccgctgcgaaagctgggaaaacgccaataaccaggcgcaaattgccgctgccgcaatgttagggctaccgctaccgctactgccgccgccgtggttctggagcgatcagtacagtgataacttacagtttattggcgatatgcgtggcgatgactggctttgtcgtggcaacccggaaactcagaaggcgatttggtttaatctgcaaaacggcgtgcttatcggtgcggtcacgctgaatcaggggcgtgagattcgcccaattcgcaaatggatccagagcggcaaaacgtttgatgcgaaactgctgatagatgagaacatcgcgcttaaaagtctgtaaccaggataattagcgaatatctcaatgcctggggcgtggcgaggtgcaagagtgtgtattacgtttaaaagtcattatcttgcaaagggattggttatgaacacactacgttattttgattttggagctgcccgccccgttttgttattaattgcccgtatcgccgtggtcttaattttcattatttttggttttcccaaaatgatgggctttgacggtacggtccaatatatggccagcttgggcgcgccaatgccgatgctggcagcgattattgcggtagttatggaagtgcccgccgcgatattaatcgtgcttggctttttcacccgtccgctggcggtgctgtttattttctacacgctgggtacggcggtgattggtcaccattactgggatatgaccggcgatgcggttgggccaaatatgattaatttctggaagaatgtcagtatcgctggcgcgttcttgctattggcaattaccgggccgggggcaatttctctcgatcggcgttaagaaagatgccggatgcggcgtgaacgccttatccggcatttaataaattacagccactctacccgcaagctcatctcactagttgtactttcccctggtgctagcgcaatgagatcacccccttccgggcgatgatgatcatccggcgcatggctcatcggttccagacagaagaaatcaaacgcatatcctttatcaaacgcagggtcggaaacaaagatgaaataacacggtgcaggtggcgtcgtttccatgatgatggcataaccttcctgcggctgctcgatgcgggcctgaccattccatccggcaaaaccattgttcacccactggcgcggcaacggcgcgggctggttaaaatccagttcctgcggtagctgctcgcaaaactcacccgccagccactgctcccgctccagccagtaaccgctcgcctgtgcctgaatccgcgtttgcgggctcaacggaaaataaggatgccagccggtaccaaatggcagcgtctctgccccttgattggtgacagagagcgtcaccgtcagcgtatccgccgttaaatgaaacgcctgacttacccgatagtgatagacaccgctgcgatgttcatacaccagacacaaactatcatcgctgtggctgacacattgccactcgcccagccagccatcgccgtgtagatagtgcgcatcccactcaacattcggttgcagttgatactcacgcccctgccagacaaaacgattgccgctcacccggtttgcaaatggcaccagcggaaaacaactggcatcggttgccacaccgctttttttaccaggacgtaagagcggcgtcgtatcgcgccagaagccttcgattacgccgccctggtcagaaacgtccagctttaggctcccgtgggataaggtatagatggtcatccgctaactccttaatccgggaagttaatcacaactttcccgcatttgccgctcgccatcagcgcataggcatcacctgcctgttccaggctgaagcgatgggtaatggcgttacgcggccacagcttccagtccgtcagatcatgggcgcatttttccatatggaacagactggtcacccaggagccgataatccgccgttgatggtgcatcagatcggcgctgacctcgaattccacttttccggtttcaccaatgtaaaccacccgtccccagtcagcggtggattgcagtgccagcaagcgacctgcggcattaccggaacaatcgagcgcaacatccgcgccaccgtgggtgagttcggcgataatctgcggcagaccttcggtggttgctaaatagccgtgatccatcacccctaactgttttgccatcgccagacgttccggcagcatatcaacgccgatgatccgttttgcaccgcgacctttcgccagcatcatcgccatcatgccgactggccccagaccgaccaccagcacgttatcactgccggaaacttcgccgcgcaaaattccttcatacgctgtaccaacgccgcaactgataaacgcaccatcttcgtagctcagcgcatccggcaggaggatcagatctttttcttccgccagcaagtattcggcatgaccgccgtcacgctgccagccgtaagccgcttttccttcgccagtacaagaaataggaaaaccgcgacggcagttcgggcaaaaaccacagccagaaatgtgatacaccagcacgcggtcgccctctttaaaatggcggcagccttgccccatcgccacaatctgcccgcacggttcatgaccgttgataaagccctggtataacggtttatcgggtgccgccgctgtggcacggtgttgatgatagatatagtggacatcgcttccgcaaatcccggaggatttcattttgatcagtacctggttaatccccggcgtcggcaccgcaacttcccgcagatcgacggtgctatttcctggtaaataagctgccagcatcgttttcataaatccctcattaacaatacgattaattttcatccctgccgcacccgcgccaggggcgttaaggtttagcgtttcgctttactgcttcgctgggtcagcaagatattcgccagcaccgccaccacgatgatgacgccgcgtaccacctgctggaaaaaggagttaataccgagcagcaccagaccgttaccgattagcgtaatcaccagcacaccaagcaatgtaccgaacagggaaccgcgaccgccggaaagtgccgtaccgccgaccacgaccgcggcgatgacgtcaaactccagaccgtttgcggcacctgcgttaccagaaccgaggcgcgccgccaacaaaatgccggtcaccgccgctaataatccgctaagggtaaagataagaatgcgcacccgacgaacgttgatgccgcacaactgcgccgccgtagcattaccgccaacggcaaaaacgctgcgcccgaaggcggttttgcggctgatgaacacaaacagcgcaaacaacacaatcatgatcagcgcggataccggcacaccgagaaattgtccgcccagccagtccagcacctcgttttcatcaatcggcactggcagtgcgttcgtcataaacagccccattccgcgcagggcgctccacagccccagtgtggcaacgaaacttggtacattaaacacgccgcgcagcaccccggccagcgttcccatcagcgcgcctaacagcaacaccagcaggcacgccaccgccagcggaacttcaaattgcagcaaaaatgccaggcacacgctgacaaaagccaccatcggcccaacgctgacatcaatttcaccggagataataatcagcgtcatcgcccaggcggcaatcccaatggtggcggcatcgcgcagcacgttcatctggttattcaaactgataaagccaggcgcgttcagggagaagaccagataaagaatggcaatcaccaccagcaaaccgatctcattaatatggcgactgacaaattgtttgaggctgacgctcttgccctgcggcaatggtaaactgctagcagacatcttcaggttcctcggtaaaattcatcagtgcacagacagaatggcggacatcagctcatccacattgaccggagcgtgaaactcctggctgaacgtgccgtgctgtaataacaggatgcggtcacacaccagcggcaactcctccacttcactggagataaacaccacgctttttccttcggcagccagctcacggacaatacggtaaatctgctgtttggcttcgatatcgacgccgcgcgttggctcgtcgagcaacaaaatctggctggcagcatagacccaacgaccgatcaccactttttgctgattgccaccagaaagcgtgccgatgggtgtttcgctactggcggccttgaccgtcatccgctgcatcacctcttcggtcaggcggcggatggtggaccattgcagcacaccgttggcgctgattttttgccgattggtcagcactgtattttcgtcaacgcccaaccagggaatgatccccgcttctttgcggttttctggcgtatagccaatgccgcgtttcagcatgtcgccgtaatcggggcgcgtgattttctcgccgttgataacaatttcgccctgttcatactcctccagcccaacaatcgccttcagcaattcactgcgccctgcccccagcagaccagcaatgccgagcacttcgccacgacgtagcgtaaaactgatatcctccagcttgggcttatggcgtaacgcacggacttccagcacggcctgatccacaatttcctgaggggctaccggcgcaatatcaacgtgatcgcgcccgagcatcaggctcacaatatgatgcgtggaggtgttttcgagcatcacatcgcccgccacctgaccatcgcgcataacggtggcacaggaggcaatgcggcgaatttcttccatccggtggctgacataaatcaccgccacgcccagtgcgctcatctttttcaccgcgctgatcaccagttcaacttccgcactcgcaaggctactggtaggttcatcaagaatgaccacgcgcggctcgcccttcatcacccgcgcaatttccaccagctgcttttgcgccgggcttagcgtactaacaagttgttcaggactaacgtcaacgcccagcgcctgtaagcaacgttgggcatcctgcgccatttgcaggtaatcaatcatgccgttgcggcggggccactgaccgaggcagaggttttccgccactgtcagcccttccaccagacttaactcctgataaaccgcgcgcacccccagttcagcggcacggcgagtcagcgtagcttcgtcaccttccagtcgcgtctcgccaatccagatatcaccgctatccgggcgttcgctgccggtaagcattcgaatgagagtgcttttgcccgcgccgtttttacctaacagcgcacgaacttcgcctttattgagcgtgaagttaacgttatccagcgcaacgacgccgggataacgcttatttcctgccaccacttttgctaccgggactgcctctgttgccgtgaacatagggacctctgcgaatcagcgattagggcagaccatcaacgtgcgttgccagccactgtttaccgtcttccgttttggtatagagatcgataggcacctgaatcactttttcaccgtcggcttgtttattgataaccttcaatgtttgcgcgaaaacagcattgcccattttcttaccggaaatatccactaccgctttcagcacctgattgttttccagctcctgagcaatttcggttgtcatatcgctaccgaaaacagcaatttttccggcctgattttgattacgtaccgcttttaccgcgccgagtgtcgcaccgccgctttcccccataatggcgttgagatccggcgtggagataattagtttttcaccaacggaaatcgctttatctaaaacagtcccttcctgattagcgacaatttgcgcgccgggaacgcgggattttaaaacttcttcaaatcctttacgtcgctgcacacaaacttcaaaggcttcgcaattgatgacggcaattttcggctggtcaattttattggcaataaaataatcagcggcagcgttacccagttttttaccaaattccagcggatcgccgaccagatacgcgctgacatatttatcgacccccttttgattaatacaggtgttgtagcaaatcaccggaatgcccgcttcactggcgcgacgaacggtacggctactgccattttcagacactgcgcttaaaataatggcatcgacattacgcgccacgagggtatcaacaaaggtactttctttgctaatatcaccctgggcgttagtttctattaactgaacttgtacactggaatcttttgccgcatcctgaacgccctgacgcactccagcgtagtatccctgagtatcaaggtatattgcgccaatggtcatttctttttccgcagccctggcaaatagtgcgctacctaatagcgtagccattaataatagattacgggttgttctcatttttgtaggcatagagcctcctgtagggtttttattaacaacggcttattctaattattttgtgatgagcggcagcgcgtgccgctcaaatattacagttaatagggtttagtgaacgcggttaaaaataaaaggcatcacggtggtgaataatgccgctttcggccaagccggattaatcgccgtcaattcagcgcgagcagactcatattgcgcaacctccccgagtcccgcggacgccagcatcgccaccatcaggcatttttctttatgctgctgttgtaaatcgccatacaggctcaacaagtcaggttggctgacggcaaagaaatccgcttcgatactggttttcgccatctcttgcgcccactgtttcatttcactaaacagttgctgtgcggtttgttgttcgcccagcagtcgcagcgccatcccttgccagaagagataatcaaccggctgatcgttgtaataactgtgaatgttaatagtgcgatcgccggtcgccgccagacgtaaacaacgcgtcgcttcagtttcatcgccctgcgcgttggcgcatatcgcctgccagaaccagatgtcgttatcagtttgccccggtaaacggccttcgcttaaattctccggataatgcagcgcggcatgaagcagttcgcaggcctgctgcggctgtctggcatcaagatgctgccaggcgcgtaataactggttgaggataaactgactggtgaccttcccttccccgccttcccacgggtggaatttgcgcgtggcgagaatgtccgccgctttgtctgcctgacccgtgagatgccacaaattgagcagttctgcggtcatgtcgtcgcgtttcagcgcaatttccagattattttccagacgcgccagtcgtttctccggtgtggctccacttaacttatccagcaaatcccgttcgaaaagcagacgtgcatcctgcggcgcaagctgataagcattatcaagataacgcgcggccagctcataatcgtgttgcttattccacgcatggatcgctaacccgcgccagccgtcggcaaactccgggctcatctctacgcaacgttgccaaaaggcaatggctttgttgtagctacgtttgttgtagtagaagcaagctagtaaatggcgagcaaaccagcactcttcaatactctccagcgccgccacttcttccagcgtattcgggaaacggacaaactgcgggaagacatcaatggcttttgcgaccagttcgccacgttcggctttcggcagcaagctggcttgcaggtaaagcggcagcgtgcgctggcagtccagtgcgttcagcatctctgccgccagggtgggcattccccagttaatcagttgcccggcggtcatcagggcgttaacgtcgcgtccctgacacagaccgcgccactgcgcgagagcactttcgctacgaccatcgaaccagttcagccaccacagagtggcgttcagcggataatcgcgcagcagtttctcgcgctgcacacgcgcgttgtcctgacgaccacttaacaccagcagcagattatgcaggcaaagcacttcctgattggttgggcaggcgcgaagactttgttggcaaaaatccagaccagcgtcgaagttaccattacgcgccgccagtcgtgccaggccataatagccaccggctttgctgttgccgctccagaccgcacgccagaaatcctcttcggcttgttgatattgtccctgacgttcgtaagcactggcgcgaatcaaactcgcctgtccgcactgcggatttttgttcagcgcatgtgcgcgtttcagagcctgagtggcatacgccaccgcttgcgggaaatctgcgcggttatattccagcatcgccagcgccaggttacagcgataatccagcgggtccagcgccacgccgcgcaggtagtaatcgaacggactacggctggcgtgatgatattgctccagatgctgaccgataaaccaggcttcatctgtactggtaatgtcttgtgctgccagtggcgctttggcgacgtccggtaacggcaacgcttgcggctgatgttcctgataactcagtacaatattgccgtcggcatcggagagctcaatggtcagcctttcaggattgataccgtgcaacacgccctggatggcggtcgcaggcatcagtgccacggcatcatcaagtaacgcgttgcatttaccgatttcgcggatcgccaggcggtatccgttcaacggagagatggcatacagcccccactcaatcccccgcttactacgctggagttttatcaccgcatcgcgggaggcattttgcaccatgcccaaagaatgataaggcaggaaatactgctcaaaacgcttctcttcgtaagcatcaagccaggtaaaatcgggctggttatcggcaaaaataccggtcatcagttcgatatacgggccgttattgtcggtcagactcttatcccacgcctggccaaattcactgtgtccccaactccactgttttttacctggcgcaatatggtggttggcaacgtgcagcaaaccgccatcttcatcgtgacaccacgcgccgacaaaatcgtactggcttttttcggccatataactggttggaacaggcacatttttatagcgagaaatgtccactccagcggagtagtccactttgtagtaagtgccggtagcgatggggaaagcggagacggcccgtttgccgtgatcaaacaccgccgttacatccggcgggaagacgctctgatgcccttccccccctttcactgccgggttggcccaccacaagaaatgacgcggcgtggcgttcccgttatagacgcggctggcgatttccagcgccgcccggtcagggcgcagggtgaaacctgtcatcacctgtaaaccatgcatcggctccgtttcgcctacccacaccgtctgtgcaccgtcttcatgggcttcgagggtgaaatcaacgggcataaaggtggtcgggcgatgatgttgcggccagttaaactcaatcccaccggaaatccacggccccagcagccccaccagcgcaggtttaatgacttcattgtgataaacaaaatcgcgctgtttcactttatcccacgcgcgatgcacccgaccgcccagttccggcaggatcatcactttgatgtagtcgttttccagccacaccgcctgccaggatttcagggttttctgctcgctcagcgtatcggtcacgccgtagggataaaccgcgccggagcttccctgataaacgcgattttccaggaacatgggatgtatatcctgcggcccggtttcataggtcgggatctcaacgcgctcttgccacacttttactggagtcatggtgccctcaatattaacaagacatactgaattaaaagatttgtggcagtgtattgaacaatctggcaatgttttcgcggaataatcacgcaattaactaaacaaggtttagtgaagatgagagcctgcattaataatcaacagattcgccaccataacaaatgcgtgattctggaactgctgtaccggcaaaagcgcgccaataaaagtacgctggcccggctggcgcaaattagcattccggcagtcagtaatattttgcaggaactggaaagcgaaaaacgggtggtgaatattgacgatgaaagccagacgcgcgggcatagtagcggtacatggctgattgcgccggaaggtgactggacgctgtgcctgaacgtgacgcccaccagtattgagtgtcaggttgctaatgcttgtttaagtccgaaaggtgaatttgagtatttacagattgatgcaccgacgccgcaggcgctgctgtccgaaatcgaaaaatgctggcatcgccaccgtaaattgtggccggaccataccatcaacctggcgttggcaatccacggtcaggttgatcctgtgaccggcgtgagccaaaccatgccgcaagcgccgtggacaacgccggtggaggtgaaatatctgctggaagagaagctcggcattcgggtgatggtcgataatgactgcgtgatgctggcgctggcggagaaatggcaaaataatagccaggaacgggatttctgcgtgatcaacgttgattacggcattggcagcagcttcgtgattaacgagcaaatttatcgcggcagtttgtatggtagcggacagattggtcacaccatcgttaatccggatggcgtcgtctgcgactgtggacgttatggctgcctggaaactgtcgccagcttaagcgcattaaaaaaacaggcgcgggtatggctaaaaagtcaaccggttagtactcaacttgatcctgaaaaactgactacagcgcagttaatcgctgcctggcaaagtggagaaccgtggatcaccagctgggttgatcgctctgccaatgccattggtttgagtctgtataacttcctcaacatcctcaatattaatcagatttggttgtacggtcgcagttgtgcctttggtgagaactggcttaatactattattcgccagacaggatttaacccgttcgaccgcgacgaaggaccgagcgtgaaagcgacgcaaattggctttgggcaattaagccgcgcacaacaggtgctgggaattggctatttgtatgttgaggcgcagttacgacagatttgatggcgcgataacgtagaaaggcttcccgaaggaagccttgatgatcataaacgaaaaattgcctgatgcgctacgcttatcaggcctacacggagattgcaatatattgaatttgcaaagttttgtaggccggataaggcgttcacgccgcatccggcatgaacaacgagcacattgacagcaaatcaccgtttcgcttatgcgtaaaccgggtaacgtgcgcagatgtcgagaactttacctttgatgcgctcgataacggcttcatcattgatgctgtccagcacgtcacacatccagccagccagttctttcgcttcggcttctttaaagccgcgacgggtaatcgccggagtacctacacgaataccggaggtcacaaacgggctcttcggatcgttcggtacgctgtttttgttgacggtgatgttagcacggcccagagcggcgtctgcttctttaccggtcaggtttttatcaaccagatcaaccaggaacaggtggttatcagtgccgccggaaaccactttgtagccgcgctcgaggaacacttctaccatcgctttagcgtttttagcgacctgctgctggtaagttttgaactcaggctccatcgcttctttcagagcaaccgctttaccggcgattacgtgcatcaacggaccgccctgaccaccagggaaaacggcagagttcagttttttgtacagctcttcgctaccacctttcgccaggatcaggccgccgcgcggacccgccagggttttgtgagtggtggtagtaacaacgtgagcatgaggaaccgggttcgggtagacgccagcagcaaccaggcccgcaacgtgcgccatatcaacgaacaggtaagcaccgatgctgtcagcgatttcacgcattttcgcccagtccaccacgccggaatatgcagagaaaccaccgataatcattttcggcttgtgttctttggcttgtttttccagatcggcgtagtcgatatgaccggtagcatcgataccgtaaggaacgatgttgtacagtttaccggagaagttaaccggagaaccgtgagtcaggtgaccgccatgcgccaggttcatacccagaacggtatcacctggttccagcagcgcggtgtagaccgcaaagttagcctgggagccggagtgcggctggacgttagcgtagtcagcgccgaacagttctttcgcacgatcgatcgccagttgttcaacgatatcaacatactcgcaaccgccgtagtagcgtttgcccggataaccttcagcatatttgttggtcagctgagaaccctgcgcctgcattacgcgcgggctggtgtagttttcggaggcgatcagttcgatgtgctcttcctgacgtactttttcctgctccatagcctgccacagttcggcatcataatcggcaatgttcatttcacgctttaacatccgcatctcctgactcagctaacaataaaatttttggcctttataggcggtcctgttggacaacggcgaacagtataaccgaatcattgtgcgataacaggtcttgacaaaggaatttacgcaaacgattaccttcaggctacgcaaggctttggagaataaagagcttgcaaccggaaacggatttcttttcaggtttgtgatgcaaatttttcacttcatcacattctttctgaaaaacaccaaagaaccatttacattgcagggctattttttataagatgcatttgagatacatcaattaagatgcaaaaaaaggaagaccatatgcttgacgctcaaaccatcgctacagtaaaagccaccatccctttactggtggaaacggggccaaagttaaccgcccatttctacgaccgtatgtttactcataacccagaactcaaagaaatttttaacatgagtaaccagcgtaatggcgatcaacgtgaagccctgtttaacgctattgccgcctacgccagtaatattgaaaacctgcctgcgctgctgccagcggtagaaaaaatcgcgcagaagcacaccagcttccagatcaaaccggaacagtacaacatcgtcggtgaacacctgttggcaacgctggacgaaatgttcagcccggggcaggaagtgctggacgcgtggggtaaagcctatggtgtactggctaatgtatttatcaatcgcgaggcggaaatctataacgaaaacgccagcaaagccggtggttgggaaggtactcgcgatttccgcattgtggctaaaacaccgcgcagcgcgcttatcaccagcttcgaactggagccggtcgacggtggcgcagtggcagaataccgtccggggcaatatctcggcgtctggctgaagccggaaggtttcccacatcaggaaattcgtcagtactctttgactcgcaaaccggatggcaaaggctatcgtattgcggtgaaacgcgaagagggtgggcaggtatccaactggttgcacaatcacgccaatgttggcgatgtcgtgaaactggtcgctccggcaggtgatttctttatggctgtcgcagatgacacaccagtgacgttaatctctgccggtgttggtcaaacgccaatgctggcaatgctcgacacgctggcaaaagcaggccacacagcacaagtgaactggttccatgcggcagaaaatggcgatgttcacgcctttgccgatgaagttaaggaactggggcagagtctgccgcgctttaccgcgcacacctggtatcgtcagccgagcgaagccgatcgcgctaaaggtcagtttgatagcgaaggtctgatggatttgagcaaactggaaggtgcgttcagcgatccgacaatgcagttctatctctgcggcccggttggcttcatgcagtttaccgcgaaacagttagtggatctgggcgtgaagcaggaaaacattcattacgaatgctttggcccgcataaggtgctgtaatttgatgttgccggatggaaacatccggcaacccttgacgcggtttaaattgccgcgtcgtcctcttcaccggtacggatgcgaatgacccgtgccacgtcaaagacgaagattttaccgtcaccgattttgccggtttgcgccgtgcgaataatggtatcgacacaggtatcgacaatgtcgtccggtacgacaatctcaattttcactttcggcagaaaatccaccatatactccgcgccgcggtacagctcggtatggcctttctggcgaccaaagcctttcacttcggtcaccgtcatgccggtaataccgacttcggccagtgcttcgcggacatcgtccagcttgaagggttttataatcgcatcaatctttttcatgctattccttgaaaaggtcgcctgtcttttgatctgctaaacgtaacacataacgccaattcattccttgaaatcgtttgcatccagctcgtgtcgggaaagcagtttataaaattctgtccggttgcgccccgccattctcgccgcgtgggtgacgttgcctttggtgatttgcagcagcttacgcaaatagttgagttcaaactgattacgtgcctcaacaaaggttggcagcgccgtattttcaccctccagcgcctgctccaccagcgcatcactaatcaccggagaactggtcagcgccacgcactgttcaatcacgttgaccaactggcgcacattacccggccagctcgcggtcatcaggcgtttcatcgcatcggtagagaacgcgcggacaaacggtttatgtcgctctgccgcctggcgcaacaggtgatttgccagtagcggaatgtcttctgtgcgctccgccagtgccggaattttcaggctgacaacgttgaggcggtaatagagatcttcgcggaattccccgcgcgccatcgcttttggcagatcacggtgagtggcagaaataatccgcacattgatatcaatatcgcggttactgcccagcgggcgcactttacgctcctgcaacacgcgcagcagtttgacctgtaacggcgcaggcatatcgccaatttcatcgagaaatagcgttccgccttccgccgcctggaataaaccttcgcgattgctgacagcgccagtaaacgcgccacgcgcatgaccaaacagctcgctctccagcaattgctcgggcaatgcgccacagttaatagcaataaatggtttgctgttgcgcgggctggcgttgtggatagcctgggcgaaaatctctttcccggtgccgctctgaccgttaatcaaaacgctgacgtcactttgcgccaccagccgcgcctgttccagcaaacgcagcatcagcgggctgcgggtgacaattgcctcgcgccagcgttcatcggtggctggcgcggattgctccagcgcatcgtcaattgcctgatatagcgcgtctttgtcgacaggcttggtgaggaaactaaaaacgccctgctgtgttgcagcaacggcatcgggaatagaaccatgcgcggtaagaataattaccggcattcccggctgcactttctggatttcagcaaacagctgcataccgtccatttcatccatccgcaggtcgctgatgactaaatctactttttcgcgattcagtacccgtaatccttcagcgccactttccgccgtgaccacactgtagccttcgctggtcaggcgcaggccaagcagtttcagcaatcccggatcgtcatcgaccaataataaatgcgcaggtttatggctcatcaggagtgacctcatgggtggatggcgcgggcttttcactctcgtgcggcgtatccgggctgaaatttccagccggtttgcgggtgctgagctggcgttcaatatcggtcaggttttccagcttgcgggtggtgagttccagttgctgctgtagaacgtgatgttgctggcgcaatgtatccagctcgctgtcgctggactgctggagtttactgtaacgttggcgctcttccgccagttgcagttgcagcgcctgaccatcgcgccagagttgatacagtgggcgaacctgtgccgggatctcggtacttaacgcttcaatacgcgcgaccagctggcggcgctcatacggcgtaattttggcgtcggcgagcaaaatcccttgtttaaaggtattttgccagctgccgtcgtcatattggcgagcttgctgacggctctgcgcaggcattaaacgatcagcacaatccatcgcccgcagccagtaaagcggattggtttcggtacttttaccttgcagcgcccagatgtcgctacattcagtagaaagatagtcagccagttgataaaccggaattttttcttctgctggcgtatcaatggctggcttattgtgattctgcacgcaacccagcaatgccagacatggcagccctgccagccacagccgtcggggcaataatcgttgaaaaatgtgtcgcatattcaccagacttaaagcctatcccagtgggcgtaattgttgcagacagtctggacatggacagcgcggagaaaccggagcgtacatatcgtacgtgaagatttcgagcactgcccggggccgaactgacaaataaaatagcctgataggataggctgttagcattatttcgtgtttttgctgctcggtaattcaatgcggaaacaaacgtcttgcccgctctcgtcgaccagatacagttccccttgcatacggcgaatacaatccctggcaatgcttaatcccagaccgctgcccttcaccgccccttttcgctggtggcttccctgaaaaaagggttcgaagatcatggcgcgttcctcttgcggaatgggcgtgcctgtattgatgacatcaatataaacccgcgcaccatgtaaactgctgcgaaggcaaatgttaccggattcagccccgtagtgcaccgcattggagtaaagattatccagtacgctcatcagcagcattggctccgccaggcaagctgttgctttgagatcgacgtcggtatgcatcattttagcccgtgcgggcaggctatgagcagaaaccactgtctccaccagcggtgctaactcaacattctccagttccaccgcactgtccgcctgtttacggttgtaatcaagcagttgttcgatcagtttttgcaaattgcggctgctgctatcaagaatgctcaccacctctttttgctctggcgtaagcggcccgacaacctggtcagccagtaattcagtgccctcgcgcatactcgccagtggcgtttttaattcatgagataaatgtcttaaaaattgatggcgttgggattccagccaactcaggcgctcacttaaccaaagaatacgttgcccaacgctgcgtaactcgctcggtccactgaagctgacgctattgcccagagaacgcccttcccccagacggttgatcatgcgctcgatatttttcaccggcccgataatcatccgcgtgaaaagcagtaccattaccagactcaccagaaatagcaccaggctttgccaaccaaaatattgcccacgttcggcgatttcacgctgaagctgctgcccacgagagaacaccactgtgcgcgtggcctgtaccatttcggtattggcactggcaaaggcttcaagacgtgcggcggcggcagcatcgggaccgctgttgttacactgaagttgagccagattgtgcaaatcctgacgtaatgcctggtagagtttatcgtccggcagcacgcctgcgtgggcatcgagcatttcgctgtaacgcttgcgctggctttgataaaccttcgccagggttgggtcgtccagcacgcaatactgacggtaactacgctccatctccagcgccgcgttggtcatcgcttcactgcgccgggcatcaataagcgtagtgcggttaaccagcgccgcctgatcgctaagcgcattcaggctttgccaggcttgccatgccagcaccaacaggggcagcagaatcagcaaaaatgccagcattaccagttgtcgtaaactgcggggaaaaacgggccagcgtttcaaggtgttactctcgtcagacgcgaatagcctgatgctaaccgaggggaagttcagatacaacaaagccgggaattacccggctttgttatggaataaggcggtgcctaactcgacgtttcgcccgatggttgatatagctacgctgatatcagaagttggacggcaggcaccttgttgtgcgtcattcgtattttatgtagcacgtcccgaaggggctgacataagtcggtgaatgagccactggttactattatgcagtaactgtgccaataaagaaaatagtttggtaacgtactgattatacgttgctttgaggggtttatgtctcctccgctgtttgaatgtaaatcagccactgtgtcgctaaaaagagacaacttaagataaacttattagataatattaaaatcaatgagttaagtgtcgccagaaagcgacacggcaaaccacccattgtcgtgatttacagacacaaaaaagctcccggagttgggagcttatgatagtggttggtgcttaatgccgcatccgggctgcaaaaccaatgggctgacgacttaccccaactgcttacgcgcattgcggaaaatgcgcatccatgggccatcctcgccccagttttccggatgccaggagttgctgacagtacggaaaacacgttccgggtgcggcatcataatggtgactcgaccactttcagtcgtgactgccgtaataccgttcggactaccgttcgggttagccgggtaggtttcagtgactttgccgaagttatcgacatagcgcagtgccaccagccctttgctttccagtgccgccagatgcgccgcatcacgcacttccacgcgcccttcaccatgagagacagcaatcggcatttggctgcccaccatcccctgcaacagcagagacgggctttgggttacttcaaccaggctgaaacgcgcttcaaagcgatcggaggtattgcgcacaaaacgtggccacaactcactacctgggatcagttcacgcagattagacatcatctggcaaccgttacatacccccagcgccagcgtttgcggacggtggaagaaggttgcaaactcatcgcgtacacggtcattgaacaggatactcttcgcccaaccttcaccggcacccagcacatcaccgtaggagaaaccaccgcacgcgaccagggcgtggaaatcttccaggcccgtgcgtccggtcagcaggtcactcatatgcacgtcgatagcatcaaagcctgcacggtggaaagctgccgccatttcaacatggctgttcacgccctgctcacgcagtacggcaactttcggacgtgcgccagtggcaatatacggtgctgccacatcttcgttgatatcgaagctcagttttacattcaggcccggatcggcgtcgttagatttcgcctgatgctcctgatcggcacactccgggttgtcacgcaggcgctgcatctgccaggtagtttctgcccaccagacacgcaacgtggtgcggctttcgctgaatacagtctgcccgttggcggtaatcacaaaacggtcaccggaaaccgcctgccctacataatggacacaatcagcaagcccatgctgtgccagtacggactcgaccgcttcacggtcagcggcacgaacctgaatcaccgcacccagttcttcgttaaacaacgccgccaggcgatcgtcacccagagtggcgatatccgcgtcaatgccacaatgaccagcaaaggccatttccgccagcgttaccagcaggccgccatcagagcggtcgtgatacgccagcagcttacgctgtgcaaccagcgcctgaatcgcgtcatagaagcctttcagttgcgcgacatcgcgtacatctgccggtttgtcgccaagctgacgataaacctgcgccagcgccgttgcgcccagcgcgttattgcctttgcccaaatcaatcagcagcagtgcgttatcttcggtagaaagctgcggcgtgatggtgtgacgtacatcttccacgcgggcaaatgcagaaatcaccaggctcagcgggctcgtcatttcgcgctcttcgttaccttcctgccagcgggttttcatgctcatggagtctttacccaccgggatcgtcaggcccagcgccggacaaagctcttcgcccacggctttaacggcttcatacaggcccgcatcttcaccagggtggcctgccgccgccatccagttggcggaaagtttgatgcgtttgatatcgccaatttgtgttgcggcgatgttggttaacgcttcaccgaccgccagacgggcagaggcggcgaaatccagcagcgcaaccggcgcacgctcgccaatcgccatcgcttcaccgtagtagctgtcgaggctggcggtagtgaccgcgcagttagcgaccggcacctgccacggccccaccatctgatcgcgcgctaccatgccggttacgctgcggtcgccaatggtcaccaggaaggttttttccgccacagtcggcagatgcagcacacgtttcaccgcgtctgcaatggtgatcccttcacgggccagcgcgtcgcctttcgctttcagcgtttgtacatcgcgggtcatcttcggcgttttaccaagcaggacgtccagcggcagatcgatcggctgattatcaaaatgacgatcgtgcagagaaagatgcagttcttcggtcgcttcaccaatcaccgcgtagggtgcgcgctcacgcttacacagttcgtcaaacagcggtaattgatcggcagcaaccgccagcacgtagcgttcctgggattcgttacaccagatttccagcgggctcatgcccggttcgtcgcttagaatctcgcgcagttcaaatttaccgccgcgcccgccgtcgctcaccagttccggcatggcgttagaaagaccgccagcgccaacgtcgtggataaacaggattgggttggcatcaccaagctgccagcaacggtcgatcacttcctggcagcgacgctccatctccgggttgtcgcgctgtacggaagcaaagtcgaggtcggcatcagactgaccagacgccatagaagacgctgcaccaccgccaagaccgatgttcattgccgggccgccgagaacgaccagcttcgcaccgacgttgatctcgcctttttgtacgtgatcggcgcgaatgttgccgatcccgcccgccagcatgatcggtttgtgataaccgcgcagctcttcgccgttgtggctgttcactttttcttcataagtacggaagtagccgttcagtgccggacgaccaaattcgttgttaaacgccgcgccgcccagcgggccttcggtcatgatgtccagcgcggtgacaatgcgctcaggcttaccgaaatcttcttcccacggctgttcgaagccaggaattcgcaggttggaaacggagaaaccaaccagacccgctttcggctttgcgccgcgcccggtggcaccttcatcgcggatttcaccgccggaaccggtcgccgcgcccggccacggagaaatcgccgtcgggtggttgtgagtttcgactttcatcagaatatgcgccggttcctgatggaaatcgtagcggcccgtttcgtggtcagcaaagtagcggcccacttcagaaccttccattacggcggcgttatctttataagcagagagaacgtgatctggcgtggtttcgaaagtatttttgatcatcttgaacaggcttttcggctgctgttcaccatcgataacccagtcggcgttaaaaattttgtggcggcagtgctcggagttcgcctgggcaaacatatacagttcgatgtcgttcgggttacgaccaagctttgtgaaagcatcctgcagatagtcaatttcatcttccgccagagccaagccaagacgcaggttagcgtcgatcagcgcctgacggccctgccccagcaaatcaacgctggtaaccggagtcggttgatggtgggcaaacaactgctctgcatcatctaaagcaaaaaagaccgtttccatcatgcggtcgtgcagttcagcggtaacctgctgccattgttcattggtcagcgtaccggcttctatatagtaagcaacgccgcgctcaaggcggtttacctgttgtagcccgcagttatgggcaatatcggtcgctttgctagaccagggagagatggtgccaggacgcggggtcaccagcaggagtttgccttgcggggcgtggctggcgagtgccgggccatatttcagcaggcgttcaagttgtgcgtgctcatcatcgtttaacggcgcattgaggtcagcaaaatggacatactcggcgtaaatattgtgaaccgggagcctggcagcctgaaaacgtgccagcagtttgttgattcggaatgcgctcagtgcagggctaccacgcagaatttccatcataagtctctcgtcttctaagctttcggtgtacccaagggggggaaacgggcgtcattataaagaatctgatgcgctgacgaaaccgtttgcgtggaaataaaatcaccatcgtgaattagcaacgcgtgccgccaatggctgtaataagttgccatctggcgcaggtttacgcaaaatgccgctcatttatgagtaaacctttcactattattacgttttttcaagctgggacgcgcacgacacagagaattaactaattgaaaaaattaaagattaattatctgttcatcggcattctggcactgctgctcgcggtcgctctctggccatccattccctggtttggtaaagccgacaaccgtatcgccgccattcaagcgcggggagagttgcgtgtgagcaccattcatactcccctgacttataacgaaatcaacgggaaaccttttggcctggattacgaactggcgaaacagtttgccgattacctcggcgtaaaactgaaagtgaccgtgcggcagaatatcagccagctgtttgacgaccttgataatggtaacgccgacctgctggcggcaggacttgtctataacagtgagcgggtaaaaaattatcagcctggccctacctattattccgtgagtcaacaactggtttataaagtgggtcagtatcgcccacgtacgctgggcaacctgacggcggagcaactcaccgttgcaccgggtcatgtggtggttaacgatctccagaccctgaaagaaacaaaattcccggaattaagctggaaggtagacgacaaaaaaggctctgcggaattaatggaagatgtcatcgaaggaaaactcgattacaccattgctgattctgtcgccatcagcctgtttcagcgcgttcacccggagctcgccgtagcgctcgatatcaccgatgaacaaccggtgacttggtttagcccgttagatggcgataataccctttccgccgccctgctcgacttcttcaacgaaatgaatgaagacggtacgctggcacgcattgaagagaaatacctggggcatggcgatgattttgattacgtcgatacgcgcacatttttacgcgccgtcgatgcggtactgccgcagttaaagcccctgtttgagaaatacgccgaagaaattgactggcgtttgctggccgctattgcttatcaggaaagccactgggatgcacaggccactagtccgacgggtgtgcgcggcatgatgatgttaaccaaaaataccgcgcaaagcctcggcattacggatcgtaccgatgccgaacagagcatcagcggtggcgtgcgttatttgcaggatatgatgagtaaagtgccggaaagtgtgccggagaacgagcggatctggtttgccctcgctgcgtacaatatgggctatgcgcatatgctggatgcccgcgccctgacggcaaaaaccaaagggaatcctgacagttgggctgacgtaaaacagcgtctgcctttacttagccagaaaccctattacagcaagctgacttacggctacgctcgtggacatgaagcctacgcttatgtcgaaaatattcgtaagtatcagattagcctggtgggttatctgcaagagaaagagaagcaggctacagaagcggcgatgcaactggcgcaggattatccggcggtaagccctacggagttgggcaaagagaaatttccttttctcagctttctttcccagagcagtagtaactatttgacccattctccctctctgctgttttccaggaaagggagtgaagagaaacaaaattaatccgtgctggattgcgcttttttctgcgctttaatttcctggcggcgcatgcgaaagaagtcactgagcaacgccgcgcactcatccgccagtattccttccgtaatttccactcggtgattcatacccggatgatgcagcacatccattaaagatcccgcagcgccagttttcgcgtcacgcgcaccaaagaccacgcgaccaatgcgactgtggatcatcgctccggcacacattacacatggttcaagcgtgacatacaacgtggcgtcgatcagacgataattttgcatcaccagaccaccctgccgcagggccatgatttctgcatgtgcggtgggatcatggcgaccaatcgggcggttccagccttcgccgattacccgattgttatgcactaataccgcgccgaccggcacttcccgctcatcccaggcacgtttcgccagcgtcagcgcgtgacgcatccagtattcgtggctaaattcgacttcagacaaaaagaaaactccggttataaaagcgcggcgcattatacacggacgctatgctttactttattccagttgctggagttcaccgcgcggggttactcgccaacgatgctgacagaaataaagcagcggattgtcctgattactgtcgctatagccactgtacagccgcagcggagtgccgattttgcgctccagttgtgcgaccttttcatgtcccagacaacgcatcgtcaatacccaaccaccatagccacgctgaatttggctggcgataagattaacccgcggcagccagggcgtatcgaaataaaccgcttcaaccagcggctgcggagagccggtaatcaaccagatatcagcatcggaacttaacaggtaggtggttaatcgctcctgaaccagcggaaaggcggtaacattgtcgcgaaaccagcgcacgaaatcggcctgcaacgtctgtaaacgtgcttcgctgtgaccaaaagtgcacccccacagaagcagactcatcggccagcgtgccgcacgaccttttatcaataacgcaatggctataatcggtaacaacggcaggacaagtaacgcattcagcggttggcgacgtagtaaatagcgcagaaaactgccgaacatatcctgctgatgcaatgttccatctaagtcaaaaaacaccacacgacgctcgtgagttgccaaaccatattcctctggactgaaacatcctgattaattttcgctactacatagcctaacagatagatcatcacttttccggcaacaatcgaccgcatcatggctaactggaatttttaattcatggcaattagcggcaatggaatataaaattcactcgcgtgtgtctcatattgcctgttgtcgccactatttcatcgcgaggaaagatatgaacggcttacttcgtatccgtcagcgttaccaggggcttgcccagagtgataaaaaactggcggattatctgctgctacaacctgatacggcgcgccatttaagctctcagcaactggccaacgaagccggagtcagtcagtccagcgtcgtgaagttcgcgcaaaaactcggctataaaggttttccggcgcttaagttggcgttgagtgaagcgctggcaagccagccggaaagtccctccgtgcccattcataaccaaatccgcggtgatgatccgttacggctggtcggcgaaaaactgattaaagaaaatactgccgctatgtacgcaacgctaaacgttaatagtgaagagaaactgcatgaatgcgtaacaatgttgcgctctgcgcggcggataattctgaccggtattggcgctagcggtctggtggcgcaaaactttgcctggaagctgatgaagattggcttcaatgctgccgcagtgcgcgatatgcatgcgctactcgcaacagtacaggcgagctcccctgacgatctgttattagccatttcctacaccggtgtacgacgcgagttaaacctggcggcagatgagatgctgcgagtgggcggaaaagtgctggcgattaccggctttactccgaatgccctgcaacagcgtgcttctcattgcctgtataccattgccgaagaacaagcgacaaacagtgctagtatctctgcttgtcacgctcagggaatgttaacggatttgctgttcattgcgctgattcagcaggatctggaactggcaccagaacgtattcgtcatagtgaagcgctggtgaaaaaactggtctgagtaaagaatgcgcgtataatgcccgcccggtttgtgttgttttgagagtttccttatggcgttgttaatcactaaaaaatgcatcaattgtgatatgtgtgaacccgaatgcccgaatgaggcgattagtatgggagatcatatctacgagattaacagcgataagtgtaccgaatgcgtagggcactacgagacaccaacctgccagaaggtgtgcccgatccccaatactattgtgaaagatccggcgcatgtcgagacagaagaacagttgtgggataaatttgtgctgatgcaccacgcggataaaatttaatattctactctggaagtagagtattaattatattactgggaagccttaacgccattatatttatttaattgatgacattagcataatcattcactaagttaatttatatagtatctgcccagacacttatttatagttattaaaggtgcgtccgactggttcaccggacgcaccttaagtacgtttccttgtgttataagaacagaaggatcagctgtaaaacagcaatgatgattttgatgacccgtttaatcaggtatcggcaatcagtcattcgtttttccttaaacaaggaatgcagccattcagattagcccttacatctccccaaaactgaacgtgcgagttattgagggtgcatgctgcactccacaccagagctttgacgacaccactcgtttcaatgggggaattctgtggcatggtgtaaagcacagcaaaatcttcaataacgaagccaattttaatgtacttacgaattggcggtcacgttaatctttccatcaatattgctttcttcgtaaaggctcgagtttttatgctaaagattgcaagttgcttgtaaaagataagtacactgatccataatcgctgttgttgagggtgcatgctgcacaaaattaaagttaaaaagtaaaacccccgttccttaccagttcgggggttttactttttaaagagaacggtattatttttaactttcaataattaccgtggcacaagcatagtgccgctcatctgccagcgttacatgcatatttgcaacgcccagcttttccgccagttttaatgcctcgccccatagccgtagccgtggtttgccgagctcatcattgaatacttcaaattgattaaacgccagaccattgcggatcccggtgccaaacgcttttgctgcggcttctttcacagcaaaacgcttcgccagaaaacgcaccggctggtggtgcgttttccagatagcccattcgttatcgcttaatacgcggcgtgccaggcgatcaccggatcgggcgatcaccgcttcgatgcgagcgatctccacaatatccgtgcctaaacctaatattgccattagccacgcgcttccagcatcagacgcttcatttctgccaccgcatctttcagtccggtcatcactgcacgaccaataatggcatgaccgatattcagttcatgcatctcagggatggcggcaatggctttcacgttgtgataggtcagaccgtgtccggcgttaactttcagaccgaggcttgcggcaaaggtcgcggctttggcgatacgcgccagctcttgcgcctgttcggcgtcagttttggcatcagcatagcaaccggtgtggatctcgataaacggtgcgccaacctctgccgcagctttgatctgctcttcatcggcgtcaataaacagagaaacctgaatcccggcatctgccagacgtttgcaggcatcgcgcattttgtcacgctgccctgcgacatccaggccgccttcggttgttacttcctgacgcttttccggtaccaggcagcaaaaatgtggcttcgtctcaacggcgatcgccagcatctcttcggtcaccgccatctccagattcatgcgggtatccagcgtctgacgcaggatgcgcacgtcgcggtcagtaatgtgacggcgatcttcacgtaaatgcacggtaatgccgtccgctcccgcctgctcggcaataaacgcggcctgcaccggatccgggtaagcggtaccgcgcgcgttgcgcagcgtagcgatatggtcaatgttgacgcctaacagtaattcagccatgacaatcctcatcattcataatgtgttttcaccgttcgcttaggcataaactgccggaacagttccctgctctttaaaggtttaccgccaagatacggcttaagcgccatgcgggtaaagcgtttcgcggcgcgcagtgtgtctgcgtcaggaaattcccgtgcgtttaacgcttttaactgccttccggtgaacgttttattgtcgataacgacgcttgcgataaaccctttttcttcgcgataacgatacgtcatggtgtcatctaccggctcgccgctacccgcacaatgggtaaaattgacgccataacccagatgcccgagcagtgccagttcaaagcggcgcagcgcgggttctggcgtaccagtgacccctgcaagagactgaatgcagtgcaagtaatcgaaaaaaagttcagagaagcgcgtctcgtattccagtacgcgggagagaagttcgttgatgtacagaccgctgtaaagcgtgataccgcttaatggcagcgccaggctgacggcttcagcactgcgcagcgttttgacttcgccacgcccgccaaaacgtagcaagagaggggtgaaaggctgtaatgcacctttcagggtagagcgtttagagcgtgcgcctttggcaaccagacgcacgcgcccgctttcctccgtgaagacgtccagcatcaggctggtttcgctccacgggcgactatgcaggacaaatgcgcgctgccagccttccatcggagttactcttaaagatcgtcaacgtaaccgagactgcgcagtgcgcgttcgtcgtcggcccaaccggatttcacttttacccacagttcaaggtgaacaggcgcttcgaacatttcctgcatgtctttacgcgcttcaatcccgatggttttgatcttggcccctttgttgccaatgaccatcttcttctgcccttcacgctcaacgagaatcaaaccgttgatgtcataaccaccgcgttcgttagagacgaaacgttcgatctccacggtcacggagtacggcagttcagcgccgaggaaacgcatcagtttttcgcggatgatttcagacgccataaaacgctgactgcgatcggtgatgtaatcttccgggaagtgatgagtcgcttcaggtagatgcttacgcacgattgccgcaatagtgtcaacattcagcccggtttcggcagagattggcacgatatcgaggaagttcatctggcttgccaggaactgcaggtgcggcagcagatcggctttctcctgcacgttgtccactttgttcaccgcgaggattaccggcgctttgccttcgcgcagtttgttgagcaccatttcgtcgtccggcgtccagcgggtgccttcaacgacaaaaatcaccagctcaacatcgccaatagagctgctcgccgctttgttcatcaggcggttaatggcgcgtttttcttccatatgcaggcccggtgtatcgacgtagatcgcctgatacgcgccttcagtatggatccccacaatgcggtgacgagttgtctgcgccttgcgggaagtgatggagattttctgccccagcagtttgttcaacaatgtggatttgccaacgttcggacgtccgacgatggcaataaatccgcagtaacttttatcgatgctcattccagctccagttttttcaacgcctgttcggcggcagcctgctcagccttacgacggctactacctgtgccaaccaccggttcactcaggccgctgacctggcagtggatagtaaattcctgatcgtgcgcttcgccacgtacctggactaccagataagtcggcagcggcagatggcgaccctgcaaatattcttgcaagcgcgttttcggatctttttgtttatcgcctgggctaatttcgtccaaacgagtttgataccagttgaggattaatttctcgacggtttgaatatcactgtcgaggaatacgccaccaattaatgcttcgacggtgtcggcgagaatactctcacgacgaaatccaccgcttttaagttcacctggccctaaacgtaagcactcgcctaactcaaattcgcgcgccagttccgccagcgtattgccacggaccagcgtggcgcgcatccggctcatatcgccttcatccacacgagggaaacggtgataaagcgcattggcgataacgtagctcagaatagagtcgcctaaaaattctaaacgctcgttatgtttactgctggcactacgatgagttaatgcctgctgcaacagttcctgatgattaaaagtgtagcccagcttccgttgaagccgattaattacgatggggttcatgcgataccaataaataaatgcgtcaacaattcagcacacgaaacagacctgatatacatggttctgctaactgcttcgctgcagtttcagtttaccggtatatggggaccaacgctgtttcgtgtgccgtggcaacctggaggtgccaaccttaaacttcgggggaatattctatacacaacgacgggggatgtcgttagccacgggagatttatctcataaataattcacgttgtcgccataacggcgacaacgtgaacgaagatggctattaatggatgccgccaatgcgacttaagcgcagaccagtcggccattcgccttcttgcttatcgaagctcatccagatagccgttgcccgaccgaccagattcgcttccggcacaaagccccagtaacggctgtccgcgctgttgtcgcggttgtcgcccatcatgaagtattgtcccggaggaacaatccaggttgccagttgttgccctggctgctggtaatacatccccacctgatcctgcgcaatcggcactgtcagaatgcggtgcgtcacatcacccagtgtctctttacgctcggaaagacgaattccattttctttggtttcgtttttcggcacttcaaagaatccgctggtcgcttccccaccattacggcgactgaaggtctgaacgaaatcgctcggttccacgttactgtaggtgaccggcagcgcgttttcacacgcctggccggaactgcatcccggttgaatcgtcagctctttactgaccggatcgtaagtgactttatcgcccggtaaacccaccgcgcgcttgatgtaatcaagctttggatcttccggatatttaaagaccacgatatcgccgcgtttcggatgaccggtttcgatcagcgttttctggtagataggatctttaatgccataagcaaacttctctaccagaataaaatcaccaattaacagagtcggcatcatgctaccactcgggatctggaacggttcataaataaagctacgcacaatcaatacgatagccagtaccggaaaaacagaagcaccggtttccagccagccaggcttcggcgcaacctttttcaacgttgctttatccagactgtccccggcagccgcctgcgccgctgcctgacgttcccgccgtttaggtgcgaaaaagaatttatccacgcaccataaaatgcccgtcaccagtgtggcaatcaccagaatcagggcaaacatattcgccatgccaactcctaagggttatttgttgtctttgccgacgtgcagaatggcgaggaacgcttcctgcggcagctcgacgttaccgatctgcttcatgcgtttcttaccttctttctgcttctgcagcagctttttcttacggctgatatcgccgccataacatttagccagtacgtttttacgcagctgtttcacggtggatcgcgcaatgatgtgcgtaccaatcgctgcctgaatggcgatatcaaactgctggcgtgggatcagatctttcatcttctccaccaactcgcgaccgcggttttggctattatcacggtgggtgatcaacgccagcgcatcaacacgttcaccgttgattaatacgtctacacgtaccatgtcggacgcctggaagcgcttgaagttgtaatccagagacgcataaccacggctggtagatttcaggcgatcgaagaagtcgagcaccacttccgccatcgggatctcgtacgtcagcgccacctgattaccgtggtaaaccatattggtctgcacgccgcgtttttctacgcacaacgtaataacgttgccgagatatgcctgcggcagcagcatgtgacactctgcaatcggctcgcgcagttcgtagatgttatttaccgcaggcagcttggatgggctgtcgacgtagataacttctctactcgtggtttcaacttcatacactacggtcggcgcagtggtgatcagatccagatcgtattcacgttccagacgttcctggatgatctccatgtgcagcaggccgaggaagccgcagcggaaaccaaagcccagcgcgctggagctttccggctcatagaacagactggcatcgttcaggctgagtttacccagcgcgtcacggaaggcttcatagtcgtcggaacttaccgggaacagaccggcgtatacctgcggtttgactttcttaaagccaggcagcgccttttctgccggattacgcgccagcgttaaggtatcgccgactggagcgccgtggatatctttaatcgcacatacgagccagcctacttcgccacatttcagttcagtgcggtcaacctgtttcggcgtgaagatgcccagacggtcggcgttataggtctgcccggtactcatgactttcactttgtcgcccttacgcagggtgccgtttttaatacggataagactaacaacgcccaggtagttgtcgaaccaactgtcgataattagtgcctgcaacgggccttccggatcgccttccggcggcggaatgtcgcgcaccagacgttcgagaacgtcctgcacaccaacgccggttttcgcactacagcgcaccgcgtcggtggcgtcgatgccgacgatatcttcaatttcttccgccacgcgttcaggatcggctgccggcaggtcaatcttgttcagtaccggcacaacttcgagatccatttccatggcggtgtagcagtttgccagggtttgcgcttctacgccctgcccggcgtcgaccaccagcaatgcaccttcacaggcagccaggctacgggaaacttcataggagaagtctacgtggcccggggtgtcgataaagttaagctgataggtttcgccgtcagacgctttgtagtccagcgtcacgctttgcgctttgatggtaatgccacgctcacgctcaagatccatggaatcgagaacctgcgcctccatttcacggtcagacaggccaccgcagatctggataatacggtcagacagcgtgcttttaccgtggtcaatgtgagctatgatgctaaagttacgtatattcttcataaagtatgattattgtgccttaatgcccggttaaccaggcttttagaagtcgctgttctgagcttaacgtctgtattaatagaaacgccgcattctacactacaacattgaggcgaggaaatgttcataccgtatggattgtggtatctggaaacgtcctcgcatttgttatgcaaaatgcaacaaagccagtgaaatcactggctcgcgtcttcgctagatgtttcaaatcgcacaaggccaggcggcaatgccacgcttaagatgatcggttgccattctgcccgggcagcaaacttacggctgtagccgcgcgcaatcaggaacccgccaataccaccgaggatcgcaccacataatgctgcgacgtcagaagcaaagagtagctgaaataggctagcgataaggaataatcccaccagcgggctcatataaaccagtaatgcggagctaagcaggctgccttcggcgatccccaattccactttttgccccggcactaacggctcatcacagggtacgacaatggtatgcgtggtttgcgggccaagtttatttaacacgcggctaccgcaaccggcgcgactagcgcagctgctgcaactagctttaacatcacaactgaccagcgcctgcccgttttgccaggagacgacggtagcccactctttgatcattgcgctgccccgaacttaatattctcggcaatgcgtttcgccgtttgcggcggcagttcaccgacaatggtgatttcggcgttatcacgtacgcttgtactgacggttctgcgtccggtgcgcaacatctgatcggtgctgcttggcgtagcgcggttaacgtttacgctgaagctgaataatccgtcggaatagagacgactttcgataggcatgttgtccatcgtcggtagcggacgtcgactactggaaacttcgctaaaaccctgtggcaaccaggttggcgtccagctgaatttagctttttcacctacaggaacagaaagcaacggcggcaaatttgccttcgccagcgtctgcatactgctgctgatatcctgattgacgttaaaagcaatcacgcgaaattgttccagcgtttcaccatcgcgatcaaggagatcaacccgcatcggtaatttgctttcggtgtccatccacacgatgtagctgtagcgtgtaccatctcgggcaaccacgcgaatgacttcgcaaagacgatcagcaatacgcgtgcgcccgacggagataaagtcgtagtaaggagaaaggcgtttgaaatcggtatagataaggcttggcagagaatcaacaatgtaatcgccattaagcgtgaacggttcaagtcccggttcaaaatagctgatttcattgccgcgctgtaccacttcccggcgcgggccatccatttgcaacaattgtgcaagaggacggttatcgaggcgtgcatgtcgataacgcagagactcaacaccctgtttattgatgctgatgaaactcagctcgtaattcagactctgactggccaggttcatctgctgtaataacgccccggacgcgggagtggcgctggcgttagcagagaataacaggctacctgtcactaaactcatggcaaaccaaagttgcttcattactggctttgcgttcctaaagtttgaattcctggcacctgtacagcggcttgctgggtttgcgcctgctcaaactgaagctgttcagagtggagtcggcgttgcagttcgtaatcctgcaacattgcattaatgcgacgacgctgctcctgtacctgctgctgttgaccattgtttgcggtcgcttcagaaggtactcccaggcttaccgggctggctttacccatcatcggcagtgtattaaataccggcgtttcgggctgctgggacgtttcagattgtccattatagtgctggacgccaacgataactgcaaggcttacgcatgcggctacgcccatttgggtaagctgtgccgcccacggacgtactttctgccagaatggcattttctgccattgatgcggcgcaggctgggcttccgggatcaatgtcgccggttgacgtactggctcttcttcaatggcggccatcacgcgactagagatatcgaaatggagcacctcgggagtatcaccccgcatactgtcacggattaagtgatagctttcccaggttttctgcatttctgggttatgagccagttcgttaagcagctcactatccagcgtttcgccatccattaaagcggaaagttgttctttctgcatgcctaatacccttatccagtatcccgctatcgtcaacgcctgataagcggttgaactttgttatcaatagcttccctcgctcggaagatacgactacgcaccgtacctaccggacaatccatgatagcggctatctcttcatagctcaggccatccagctcccgcaaggttattgccatgcgtaaatcttccgggagggactcaatagttcggaaaactatctgtctcagttcttcactcaacattaagttctcagggttgctaatttctttcaacgcgccgccactttcgaagttttcagcttcaatggcatccacatcactggaaggtggacgacgcccctgagcaaccaggtaatttttcgctgtatttacagcaatccgatacagccatgtataaaaagcgctatctccccggaagctatccagcgcacgataggctttaataaaagcttcttgtaccacatcgggaacatcaccgctcggcacatagcgggaaaccagactcgccactttatgctgatagcgcactaccagtaagttaaaggctttctgatctcccttctggacccgttcaaccaggacctggtccgttaactgctcgctcatccgaggtaaagtctccccaaaccaaatttccacgcgctatcgaaacgccactccattagctgcaatttgagcaagcaaagggttagagtgtctcgtttttgtaaagttccgtaacgcatctgtttttgtttgtcatgctgtagacggatcattatctatcattataagtctacagaatctgaacatcgcattatctgtgtagaaatgcccatttaactgcctgaagagtaacccaacggcctttttatttcaccacctaatcctccaccagccagtaacttctctttttctcgccgccctgcgtcagcgtgtttagcaactgtaacaaatattaaaatagcaggtgtttatccgcacaacatgatgctatgctgaccaaaccatgtttagtaaattaaacaaagaaaatgaatactctccctgaacatagttgtgacgtgttgattatcggtagcggcgcagccggacttagtctggcgctacgcctggctgaccagcatcaggtcatcgttctaagtaaaggcccggtaacggaaggtagtacattttatgcccagggcggtattgccgccgtgtttgatgaaactgacagcattgacagccatgtggaagacacattgattgccggggctggtatttgcgatcgccatgcagttgaatttgtcgccagcaatgcacgatcctgtgtgcaatggctaatcgaccagggggtgttgtttgatacccacattcaaccgaatggcgaagaaagttaccatctgacccgtgaaggtggacatagtcaccgtcgtattcttcatgccgccgacgccaccggtagagaagtagaaaccacgctggtgagcaaggcgctgaaccatccgaatattcgcgtgctggagcgcagcaacgcggttgatctgattgtttctgacaaaattggcctgccgggcacgcgacgggttgttggcgcgtgggtatggaaccgtaataaagaaacggtggaaacctgccacgcaaaagcggtggtgctggcaaccggcggtgcgagcaaggtttatcagtacaccaccaatccggatatttcttctggcgatggcattgctatggcgtggcgcgcaggctgccgggttgccaatctcgaatttaatcagttccaccctaccgcgctatatcacccacaggcacgcaatttcctgttaacagaagcactgcgcggcgaaggcgcttatctcaagcgcccggatggtacgcgttttatgcccgattttgatgagcgcggcgaactggccccgcgcgatattgtcgcccgcgccattgaccatgaaatgaaacgcctcggcgcagattgtatgttccttgatatcagccataagcccgccgattttattcgccagcatttcccgatgatttatgaaaagctgctcgggctggggattgatctcacacaagaaccggtaccgattgtgcctgctgcacattatacctgcggtggtgtaatggttgatgatcatgggcgtacggacgtcgagggcttgtatgccattggcgaggtgagttataccggcttacacggcgctaaccgcatggccagcaatagtttgctggagtgtctggtctatggctggagcgcggcggaagatatcaccagacgtatgccttatgcccacgacatcagtacgttaccgccgtgggatgaaagccgcgttgagaaccctgacgaacgggtagtaattcagcataactggcacgagctacgtctgtttatgtgggattacgttggcattgtgcgcacaacgaagcgcctggaacgcgccctgcggcggataaccatgctccaacaagaaatagacgaatattacgcccatttccgcgtcagtaataatttgctggagctgcgtaatctggtacaggttgccgagttgattgttcgctgtgcaatgatgcgtaaagagagtcgggggttgcatttcacgctggattatccggaactgctcacccattccggtccgagcatcctttcccccggcaatcattacataaacagataaaaagcctgggtcagcgccgtatacgcttcggaatagttctggtctggcccacgaatgactaagcgatcgctaaagcattctcccgcctgcggggagaatgccagcagcacccgatgcggcagtcgcgcttcgttttccgccacatccgtccgcaaacgtaaatgccagcccatgcttaatgccagctccgtaaaaccattaccaatctgctctggcagcactacgcagaaaaatccctcttcggtaatgcactccgccgcacaggtcagcaagcttgggtgatcaagcgtagtggtatagcgagcctgttcccgttgaggtgtgctgcactctactccctgctgatagtaaggtgggttactgatgattaaatcgaagcgtactgtctgctgtgtaatccactgctgaatatccgccgtatggacgttaatccgctctgcccacggggactggttgatattttcctgcgcctgcgcggcagcttcactttccagttcaactgcatcaatcatcacgctgtcatcggttcgctgcgccagcattaatgccagcaacccgctacccgcgccgatatcaaggcaacgttttaccccagccaccggtgcccatgcgcccaataaaataccatccgttcccactttcatcgcacagcgatcgtgagcaacaaaaaactgtttaaaagtaaatccattacgacgaagcacggatgtagactgactcatgaaaataaaaccttgcaggaaaaacggcgatagcaccgggtgagaacaatacccgagaagcgatatccatacaaacagatgaagattgcagccgtaacgtctataatcagcgccccacacagaggtagaacatgactgtaacgactttttccgaacttgaactcgacgaaagcctgctggaagccctccaggataaaggtttcactcgcccgaccgccattcaggctgccgccattccgcctgcgctcgatggccgtgatgtactcggttctgcgccgacaggcaccggtaaaacggcggcgtatctgctgccagcgttgcagcacctgctcgatttcccgcgtaagaaatccggtccgccgcgtattttgatcctcaccccaactcgcgagctggcgatgcaggtgtccgatcatgcccgcgaactggcgaaacatacgcatctggatatcgccaccatcaccggcggcgtagcctatatgaaccacgcggaagtgttcagcgaaaatcaggacatcgtggtcgccacgaccggacgtctgctgcaatacataaaagaagagaacttcgattgccgcgcggttgaaacgctgatcctcgacgaagcagaccgtatgctggatatgggcttcgctcaggatatcgaacatattgctggcgaaacgcgctggcgtaaacagaccctgctctttagcgcaacgctggaaggcgatgcgattcaggactttgccgagcgtctgctggaagatccggtggaagtttctgccaatccctccacccgtgagcgcaaaaaaattcatcagtggtattaccgcgccgatgatcttgagcataaaaccgcgttgctggtgcatctgttaaaacagccggaagcgacccgcagtattgtgtttgtgcgtaagcgtgagcgtgtgcatgagctggcaaactggctgcgcgaagcgggcatcaacaactgctatctcgaaggtgagatggtacagggcaagcgtaacgaagcgatcaagcgtttgaccgaaggtcgcgtaaacgtactggtcgcaaccgatgttgccgcgcgcggtatcgacattcctgacgtcagccacgtctttaacttcgatatgccgcgcagtggcgatacttatttgcaccgtatcggacgtaccgcgcgcgccggtcgtaaaggcaccgcaattagcctggtggaagcccatgaccatctgctgctgggtaaagtaggccgctatattgaagagccaattaaagctcgcgttattgatgagttacgcccgaaaacgcgtgcgccaagcgaaaagcagaccggcaagccaagcaagaaagtactggctaaacgtgctgagaagaaaaaagctaaagagaaagagaagccgcgggtgaaaaaacgccatcgcgacaccaaaaatattggtaagcgccgtaaaccaagcggaacgggcgtgccaccgcaaacgacagaagagtaatctcaatgccaggtttaagcctggtattaaaagtgctggcaaacgcaaaactgcctgatgcgctacgcttatcaggcctacgtggctcatgcaatatattgaatttgcacgatcttgtaggccggataaggcgttcacgccgcatccggcatgaataaagcgcactttgtcgacaagttaaatgccgggtttaatcccgacattatttttatccagccacaaaactctcttcaacacactgaataaaagtgtgcatcgccgggctaaccgcttttccagcatgatgtgcgcacatggccgtaatggtctggctctgttcgccaaaaggcaattcaattaattctccgcactccaactcttttgccaccgcaaagcgcggtaggtagctgaccccgatattcgccgcgacacaacgcttgatgctttcgatacttataagctcaatggtgttttccaccgtgatccgccgctgacgcagcgtgctctcaaatatctgccggaagacacattgcggttcgttgataataaagctacaggcgttatgtcttcccggctcagtaaaatcgacatctgcaatttgcggactagccaccagcaccagactttgttcacccaactctcgtcgattcagagcatcatcattccctacacgataaaagacgccaacatcggcctcatcattcagtagcgcatcacggatcacgtaacagttcaggctctgcaagcttaaacgcacttttggggcgcgttgccgaaaacgctgcaacacctgcggcattcggtaagagagcaacgtttcgccgctaacaacgcgtagttccccgtccggatcactctcctttttggcagcctcacgaagcgtatccatcactcgggtaagttcataaatgtgcggcagcaacttttttccttcgcgggtaaggcacatccgtcggccaattttctcaaataactggacactaaactcctgctcaagctgctgaatatgaaaagtcaccgtgctttgtgtacagcacaatttttggctagctcgcaaaaaggaaccctcttccaccacggttttaagcgtaataaaacggcgcagatccataaccccaaacctatcgaaaatatcgaatctagaatataaaaacattcatttttttaaatgttccgtgtcgggtactgtctaccaaaacagaggagataacaagtgacaccgacccttttaagtgctttttggacttacaccctgattaccgctatgacgccaggaccgaacaatattctcgcccttagctctgctacgagccatggatttcgtcaaagtacccgcgtgctggcagggatgagtctgggatttttgattgtgatgttactgtgtgcgggcattagttttagtctggcagtgattgacccggcagcggtacaccttttgagttgggcgggggcggcatatattgtctggctggcgtggaaaatcgccaccagcccaacaaaggaagacggacttcaggcaaaaccaatcagcttttgggccagctttgctttgcagtttgtgaacgtcaaaatcattttgtacggtgttacggcactgagcacgtttgttctgccgcaaacacaggcgttaagctgggtagttggcgtcagcgttttgctggcgatgattgggacgtttggcaatgtgtgctgggcgctggcggggcatctgtttcagcgattgtttcgccagtatggtcgccagttaaatatcgtgcttgccctgttgctggtctattgcgcggtacgcattttctattaacgaaaaaaagcggaagaggtcgccctcttccgcttagtaacttgctacttaagccttacaggctttcagtaaaggtacgagcgataacgtcgcgctgctgttccggagtcagagagttaaagcgaactgcataaccggatacacggatggtcagctgcggatatttttccggatgcttaactgcatcttccagagtttcgcgacgcagaacgttaacgttcaggtgttgaccaccttcaacgcgaacttctggtttcacttctactggaacttcacggtattcaatgtcacccagtttgcttactgcaaccacttcatcttctgcataacctgcttttgcaacgatgcaacgcgcttcgcctttttcgctgtccagcagccagaaagagttcagcagatcgtcgttagcggctttagtaatctggatacctgtaatcatgtgatgcctccccggcaaaattatttgatttgttcagcctgtcgcggccaattggtaaaaccattgttgcttgagtgtatatatactcctcaaacacccttgaatctttgatttaaatcaataaaaaccacacatcaagtatggtcgcaaatggattttattgttttacatcaacttatgcgggtgtgaaattttaccaatttacatttttttgcactcgtttaagtctaaaaaatgagcatgattttgttctgtagaaagaagcagttaagctaggcggattgaagattcgcaggagagcgagatggctaacgaattaacctggcatgacgtgctggctgaagagaagcagcaaccctattttcttaatacccttcagaccgtcgccagcgagcggcagtccggcgtcactatctacccaccacaaaaagatgtctttaacgcgttccgctttacagagttgggtgacgttaaagtggtgattctcggccaggatccttatcacggaccgggacaggcgcatggtctggcattttccgttcgtcccggcattgccattcctccgagtttattgaatatgtataaagagctggaaaatactattccgggcttcacccgccctaatcatggttatcttgaaagctgggcgcgtcagggcgttctgctactcaatactgtgttgacggtacgcgcaggtcaggcgcattcccacgccagcctcggctgggaaaccttcaccgataaagtgatcagcctgattaaccagcatcgcgaaggcgtggtgtttttgttgtggggaagccatgcgcaaaagaaaggggcgattatagataagcaacgccatcatgtactgaaagcaccgcatccgagcccgcttagcgcgcatcgtggattctttggctgcaaccattttgtgctggcaaatcagtggctggaacaacgtggcgagacgccgattgactggatgccagtattaccggcagagagtgagtaaatttgcggggaaatgccggatggcagagttgccacccggctgatttatcaggctttattctgacgccaccattcaccaagcaaaacgccggttgcgacagagatattcagcccggcaacgttgcccgtaccgtcaatcttcacgcgcagatcgttcggatcgcgtgcggcatccggtaacccttcatattcctgacccagcaccagtaccattttcgctggcagactagttttgaacagcggtttaccctgctcgctggaagtggtcactacggtgtaacctgcctgacggaaatcatccagcacgttaacaatgttgtcgccagtaatcggctgaacgtgctctgcgccgccttctgcggtacggatagccgccccgctctccagcagtgccgcatcctgcaccacgacacctttcacgccgaagtgcgcgcagctgcgcatcatgccacccaggttatgcgggttagattcgttttccagtgccagaacgcaatcctgcgcgcctgcctggcttacccactgctgcacggttgtaccgttacgctttttgatcaagaagcaaacgccgccgtgatgttccgtgccactcgcttttgtcaattccgcttcatccaccacatggtacgctttgcggtttgctgccatccagcgcaaagcttctttaaaacgcggcgttacactctggataaaccaggcgcgaacaatcgcttccggacggctctggaaaagtgcctgacatgcattttcgccgtagacgcgggtttcttccgcacgctgacgacgcaacacttccggatcaataaaacttttaccactgatgccaccgtgatcggccttttccggcgtctcatcacccggcgcgcgggaaaccgtgcgccacgggctatcttcccacttgcggtcacggggctgactctgtttgtcatcgcgggcggggcgacggccaccgtcagcacgagattttcctggacgcccgccccctttcccggtacgcgggttgtgggtacgtttatcagaatcatcatcactgcggacatacatcactttgaccttgccgcttttacctttcatttcatcgttcatgcttttctccaccagcgctgcgcgaagcgcgcagattacccgaagtccgcgcggttcgccatgatttcgtaccaaagcctgcgactatcatacctattgaataaaacagattgttgtctggaacaatgtccccgataatatgtaacatattagaaacataccggcgtcgttgccgataagtctccttactcatcccgaggttagttatgaataccgtttgtacccattgtcaggccatcaatcgcattcccgacgatcggatcgaagatgcggcaaaatgcggacgctgcggtcacgacttgtttgacggagaggtgattaatgcgaccggtgaaacactcgacaaattgctgaaggatgatctacctgtggtgatcgacttctgggcaccgtggtgcggcccctgccgtaatttcgcaccaatttttgaagatgtcgcgcaagagcgtagcggtaaagtgcgctttgtgaaagtgaataccgaagctgaacgtgaattgagcagtcgctttggaattcgtagtataccgacgatcatgattttcaaaaacggtcaggttgtcgacatgcttaatggcgcagtaccgaaagcgccgttcgatagctggctgaacgaatctctttaatcttaccggggcgcatcttgtgccccgttttctcctctgcgacaatggcgttttttcgacgctctcttatgaccgaaaacgctgttctccagttacgcgccgagcgtattgcgcgcgcaacacgtccttttcttgcccgcggtaatcgcgttcgtcgctgccaacgctgtcttttgccagagaaattatgtctctgtagcacaattaccccagcacaagcaaaaagtcgcttctgtttgctgatgttcgacaccgagccaatgaagcccagtaataccgggcgtctcattgctgatattttgcctgataccgttgcgtttcaatggagccgtaccgaacccagccaggatttgctggagttggtgcaaaacccggactatcagccaatggtggtctttcccgctagctatgctgatgagcaacgggaagtgatcttcacaccacctgccggtaagccaccgctgtttatcatgctcgatggtacctggccggaagctcgcaagatgtttcgtaaaagtccgtatctggataatcttcccgtcatttccgtcgatctttcccggctttctgcctatcgcctgcgtgaagcccaggctgaaggccaatattgtactgccgaggtagccatcgcactgttagatatggccggcgataccggggcggcggcagggttaggcgagcattttacccgctttaaaacacgctatctggcaggaaaaacgcaacatctgggtagcatcacagcagaacagttagaaagcgtttaaaatcattcggtcacttctgcgggagaccggtatgagtcagcgaggactggaagcactactgcgaccaaaaagcatagcggtaattggcgcgagcatgaaacccaatcgcgcaggttacctgatgatgcgtaacctgctggcgggaggctttaacggaccggtactcccggtgacgccagcctggaaagcggtgttgggtgtgttggcctggccggatattgccagcttgccctttacacccgaccttgcggttttatgtaccaatgccagccgtaatcttgctcttctggaagagctcggcgagaaaggctgtaaaacctgcattattctttccgccccggcaagccaacacgaagatctccgcgcctgcgccctgcgccataacatgcgcctgcttggaccaaacagtctgggtttactggctccctggcaaggtctgaatgccagctttagccctgtgccgattaaacgcggcaagctggcgtttattagccaaagcgctgccgtctccaacaccatcctcgactgggcgcaacagcgtaagatgggcttttcctactttattgcgctcggcgacagcctggatatcgacgttgatgaattgcttgactatctggcacgcgacagtaaaaccagcgccatcctgctctatctcgaacagttaagcgacgcgcgacgctttgttagcgcggcccgtagtgccagccgtaataaaccgattctggtgattaaaagcggacgtagcccggcggcacagcgactgctcaacacgacggcaggaatggacccggcatgggatgcggctattcagcgtgccggtttgttgcgggtacaggacacccacgagctgtttagcgcggtggaaacccttagccatatgcgcccgctacgtggcgaccggctgatgattatcagcaacggtgctgcgcctgccgcgctggcgctggatgccttatggagtcgcaatggcaagctggcaacgctaagcgaagaaacctgccagaaactgcgcgatgcactgccagaacatgtggcaatatctaacccgctcgatctacgcgatgacgccagcagtgagcactatattaaaacgctggatattctgctccacagccaggattttgacgcgctgatggttattcatagccccagcgccgctgctcccgcaacagaaagcgcgcaagtattaattgaagcggtaaagcatcatccccgcagcaaatatgtctctttgctgacgaactggtgcggcgagcactccagccaagaggcacgacgtttattcagcgaagccgggctgccgacctaccgtaccccggaaggaaccatcactgcttttatgcatatggtggagtaccggcgtaatcagaagcaactacgcgaaacgccggcgttgcccagcaatctgacttccaataccgcagaagcgcatcttctgttgcaacaggcgattgccgaaggggctacgagcctcgatacccatgaagttcagcccatcctgcaagcgtatggcatgaacacgctccctacctggattgccagcgatagcaccgaagcggtgcatattgccgaacagattggttatccggtggcgctgaaattgcgtagcccggatattccacataaaagcgaagttcagggcgtcatgctttacctgcgtacagccaatgaagtccagcaagcggcgaacgctattttcgatcgcgtaaaaatggcctggccacaggcgcgggtccacggcctgttggtgcaaagtatggctaaccgtgctggcgctcaggagttgcgggttgtggttgagcacgatccggttttcgggccgttgatcatgctgggtgaaggcggtgtggagtggcgtcctgaagatcaagccgtcgtcgcactgccgccgctgaacatgaacctggcccgctatctggttattcaggggatcaaaagtaaaaagattcgtgcgcgcagtgcgctacgcccattggatgttgcaggcttgagccagcttctggtgcaggtttccaacttgattgtcgattgcccggaaattcagcgtctggatattcatcctttgctggcttctggcagtgaatttaccgcgctggatgtcacgctggatatcagcccgtttgaaggcgataacgagagtcggctggcagtgcgcccttatccgcatcagctggaagaatgggtagaattgaaaaacggtgaacgctgcttgttccgcccgattttgccagaagatgagccacaacttcagcaattcattagccgagtcaccaaagaagatctttattaccgctactttagcgagatcaacgaatttacccatgaagatttagccaacatgacacagatcgactacgatcgggaaatggcgtttgtagcggtacgacgtattgatcaaacggaagagatcctcggcgtcacgcgtgcgatttccgatcctgataacatcgatgccgaatttgctgtactggttcgcagcgatctcaaagggttaggcttaggtcgacgcttaatggaaaagttgattacctatacgcgagatcacggactacaacgtctgaatggtattacgatgccaaacaatcgtggcatggtggcgctagcccgcaagctcgggtttaacgttgatatccagctcgaagaggggatcgttgggcttacgctaaatcttgcccagcgcgaggaaagttgagtaaggtactggaaatgttgaccacttaatcgggactggtgttattattgcccgcttatgtcgtctgcattgcacagaggacccttcaatgaacagagaagaaatgcactgtgatgttgagtaaatttaagcgtaataaacatcaacaacaccttgcccaactacccaagatttctcaaagtgttgatgatgtcgatttcttttacgctcccgccgacttccgggagacgctgctggaaaaaatagccagcgcgaagcagcgcatttgcattgtcgccctgtatctcgaacaggatgacggtggcaaaggcattctgaacgcgttgtatgaggctaaaaggcagcgtccggaactggatgtgcgggtgctggtcgactggcatcgtgcacaacgtggacgcattggcgctgcggcatctaacactaacgctgactggtactgccgcatggcgcaggaaaatccgggcgtagatgttccggtttatggcgttccaatcaatactcgtgaagcccttggtgttctgcactttaaaggctttatcatcgacgatagcgtactttatagcggtgccagcctgaacgatgtttacctgcatcagcacgataaatatcgctacgaccgttatcatctgatccgtaaccgtaagatgagtgacattatgtttgaatgggttacacagaatattatgaatggccgcggcgttaatcgtctggatgatgttaatcggccaaaaagcccggaaatcaagaacgatattcgtctgttccgccaggagctgcgtgatgccgcttatcatttccagggcgatgccgacaacgatcagctttctgtaacgccgctagtggggctggggaaaagcagtctgttgaacaagaccattttccatcttatgccttgtgccgagcagaaactaaccatctgtacgccatacttcaacctgccagcaatccttgtgcgcaatattatccagttgctgcgcgaagggaaaaaggtcgaaattattgttggtgataaaaccgcgaatgacttctacattccggaagatgaacctttcaagataattggcgcattgccttatctctatgagatcaatctgcgtcgtttcctgagccgtttgcagtattacgtcaatactgaccagctagtggttcggttatggaaagatgacgacaacacctatcacctgaaagggatgtgggttgatgataagtggatgttgatcaccggtaataacctgaacccgcgcgcctggcgtctggatctggaaaacgccattttgatccacgatccgcaacttgagctggcgccacagcgagagaaagaactggagctgatccgcgagcataccaccatcgttaagcactatcgcgatctgcaaagtattgccgattatccggtgaaggttcgtaaactcatccgccgtttgcgccgtatccgcatcgaccgattaattagccgcatcctgtaatcacaaccccgtcctgtacggggtttgttttttggaggccacgttttgcgtattctttttgtctgttcgctattgttactttctggatgcagccatatggctaacgatagctggagcgggcaggataaagctcaacactttatcgccagcgcgatgctttccgccgccggaaatgaatatagtcagcatcaggggatgagccgggatcgcagtgccatgtttggattgatgttctctgtcagtttgggggcgagtaaagagctttgggatagccgccccgaagggagcggctggagctggaaggatttggcctgggatgtcgccggtgcaagcaccggctataccgtctggcaactgacccgtcattaaagacgcatccccttccctttgcgatgtagcatcaaagaaaccagaaacgccaccacggccatcaaggtcacataccagaagaaggctgtttccattcctatacttttcaggctcaacgctacgtactccgcgctaccaccaaatatagcattagcgaccgcataactcagaccaacgcctaatgcgcgaacctgtgccgggaacatctcagccttcagtattccactgatacttgtataaaaactcactatcagcagggcacacatcaccagaccaaaagcggcataagggctggaaacgttttgcaatgcactgagaataggaacggtaaaaatggctgccaggctaccgaaacataacatactggtacggcgaccaatcttatcgctcagcgcgccaatgagtggttgaataagcatgaatacaaacaatgcggcagtcataatgccactcgccacgttggcatgcattcccgcagtatttaccagatacttctgcatataagtagtgaaggtatagaaacaaagggagcccgcagcggtaaaaccgagaaccatgatgaatgcacggcgattgcgccataatcctttcagagatccagcttcttttaaagcgcgcgtttcttgttggctagtttcatctaactgacgacgtaaccacaacgccacaacagctaacacagctcctaacgcgaaaggaatacgccatccccactctctgagtgcagcgtcttccatggtgtgttgtaaaaccacgacaaccagtagggctagcagttgtccgccgatcaacgtcacatactgaaaacttgcgtaaaaacctttgcgcccttcaacggcaacttcactcatataggtggcgctggtgccatattctccgccaacagataatccctgaaataaacgagcgagaagcaataatgccggagcccacgtacctatagtttcataacctgggaggcaggcgataaccaggcttccgaaacacatcatacacacgcttaacagcatgctttttttgcgaccatgtttatcggctatgcggccaaatagccaaccgcctattgggcgcatcaggaatcccgcagcaaaaacacctgctgtttgtagtagttgagtcgtcgtgttcccggaagggaagaagatgtgggcaaagtagagactacagaagctgtagacatagaaatcgaaccactcgaccagattaccactagaggcccccacaatcgcccaaatgcggcgacgagtatcactacttgtcagtttgctgtctgccgttacagtactttcagccatgccattatgtctcctgccgtaatccgatgcttttgtcggtcgcttttgtttattttttttgtaaaggaaatattatacatttgttgcatatcattatgcaaccttaaccatgaatttagttagcaggaaaatggttattgaggagcttaaggataaatttctggtaaggaggacacgtatggaagtgggcaagttggggaagccgtatccgttgctgaatctggcatatgtgggagtataagacgcgcagcgtcgcatcaggcatttttttctgcgccaatgcaaaaaggccatccgtcaggatggcctttcgcataatttgatgcctggcagttccctactctcgcatggggagaccccacactaccatcggcgctacggcgtttcacttctgagttcggcatggggtcaggtgggaccaccgcgctacggccgccaggcaaattctgttttatcagaccgcttctgcgttctgatttaatctgtatcaggctgaaaatcttctctcatccgccaaaacagcttcggcgttgtaaggttaagcctcacggttcattagtaccggttagctcaacgcatcgctgcgcttacacacccggcctatcaacgtcgtcgtcttcaacgttccttcaggacccttaaagggtcagggagaactcatctcggggcaagtttcgtgcttagatgctttcagcacttatctcttccgcatttagctaccgggcagtgccattggcatgacaacccgaacaccagtgatgcgtccactccggtcctctcgtactaggagcagcccccctcagttctccagcgcccacggcagatagggaccgaactgtctcacgacgttctaaacccagctcgcgtaccactttaaatggcgaacagccatacccttgggacctacttcagccccaggatgtgatgagccgacatcgaggtgccaaacaccgccgtcgatatgaactcttgggcggtatcagcctgttatccccggagtaccttttatccgttgagcgatggcccttccattcagaaccaccggatcactatgacctgctttcgcacctgctcgcgccgtcacgctcgcagtcaagctggcttatgccattgcactaacctcctgatgtccgaccaggattagccaaccttcgtgctcctccgttactctttaggaggagaccgccccagtcaaactacccaccagacactgtccgcaacccggattacgggtcaacgttagaacatcaaacattaaagggtggtatttcaaggtcggctccatgcagactggcgtccacacttcaaagcctcccacctatcctacacatcaaggctcaatgttcagtgtcaagctatagtaaaggttcacggggtctttccgtcttgccgcgggtacactgcatcttcacagcgagttcaatttcactgagtctcgggtggagacagcctggccatcattacgccattcgtgcaggtcggaacttacccgacaaggaatttcgctaccttaggaccgttatagttacggccgccgtttaccggggcttcgatcaagagcttcgcttgcgctaaccccatcaattaaccttccggcaccgggcaggcgtcacaccgtatacgtccactttcgtgtttgcacagtgctgtgtttttaataaacagttgcagccagctggtatcttcgactgatttcagctccatccgcgagggacctcacctacatatcagcgtgccttctcccgaagttacggcaccattttgcctagttccttcacccgagttctctcaagcgccttggtattctctacctgaccacctgtgtcggtttggggtacgatttgatgttacctgatgcttagaggcttttcctggaagcagggcatttgttgcttcagcaccgtagtgcctcgtcatcacgcctcagccttgattttccggatttgcctggaaaaccagcctacacgcttaaaccgggacaaccgtcgcccggccaacatagccttctccgtccccccttcgcagtaacaccaagtacaggaatattaacctgtttcccatcgactacgcctttcggcctcgccttaggggtcgactcaccctgccccgattaacgttggacaggaacccttggtcttccggcgagcgggcttttcacccgctttatcgttacttatgtcagcattcgcacttctgatacctccagcatgcctcacagcacaccttcgcaggcttacagaacgctcccctacccaacaacgcataagcgtcgctgccgcagcttcggtgcatggtttagccccgttacatcttccgcgcaggccgactcgaccagtgagctattacgctttctttaaatgatggctgcttctaagccaacatcctggctgtctgggccttcccacatcgtttcccacttaaccatgactttgggaccttagctggcggtctgggttgtttccctcttcacgacggacgttagcacccgccgtgtgtctcccgtgataacattctccggtattcgcagtttgcatcgggttggtaagtcgggatgacccccttgccgaaacagtgctctacccccggagatgaattcacgaggcgctacctaaatagctttcggggagaaccagctatctcccggtttgattggcctttcacccccagccacaagtcatccgctaatttttcaacattagtcggttcggtcctccagttagtgttacccaaccttcaacctgcccatggctagatcaccgggtttcgggtctataccctgcaacttaacgcccagttaagactcggtttcccttcggctcccctattcggttaaccttgctacagaatataagtcgctgacccattatacaaaaggtacgcagtcacacgcctaagcgtgctcccactgcttgtacgtacacggtttcaggttctttttcactcccctcgccggggttcttttcgcctttccctcacggtactggttcactatcggtcagtcaggagtatttagccttggaggatggtccccccatattcagacaggataccacgtgtcccgccctactcatcgagctcacagcatgtgcatttttgtgtacggggctgtcaccctgtatcgcgcgcctttccagacgcttccactaacacacacactgattcaggctctgggctgctccccgttcgctcgccgctactgggggaatctcggttgatttcttttcctcggggtacttagatgtttcagttcccccggttcgcctcattaacctatggattcagttaatgatagtgtgtcgaaacacactgggtttccccattcggaaatcgccggttataacggttcatatcaccttaccgacgcttatcgcagattagcacgtccttcatcgcctctgactgccagggcatccaccgtgtacgcttagtcgcttaacctcacaacccgaagatgtttcacttcagagttgcgaaaatttgagagactcacgaacaactttcattgttcagtgtttcaattttcagcttgatccagatttttaaagagcaaatatatcaaacaagacttaacagtctgttttgagatattgaggtcggcgactttcactcacaaaccagcaagtggcgtcccctaggggattcgaacccctgttaccgccgtgaaagggcggtgtcctgggcctctagacgaaggggacacgaaaattgcttatcacgcgttgcgtgatattttcgtgtagggtgagctttcattaatagaaagcgaacggccttattctcttcagcctcactcccaacgcgtaaacgccttgctattcacttttcatcagacaatctgtgtgagcactgcaaagtacgcttctttaaggtaaggaggtgatccaaccgcaggttcccctacggttaccttgttacgacttcaccccagtcatgaatcacaaagtggtaagcgccctcccgaaggttaagctacctacttcttttgcaacccactcccatggtgtgacgggcggtgtgtacaaggcccgggaacgtattcaccgtggcattctgatccacgattactagcgattccgacttcatggagtcgagttgcagactccaatccggactacgacgcactttatgaggtccgcttgctctcgcgaggtcgcttctctttgtatgcgccattgtagcacgtgtgtagccctggtcgtaagggccatgatgacttgacgtcatccccaccttcctccagtttatcactggcagtctcctttgagttcccggccggaccgctggcaacaaaggataagggttgcgctcgttgcgggacttaacccaacatttcacaacacgagctgacgacagccatgcagcacctgtctcacggttcccgaaggcacattctcatctctgaaaacttccgtggatgtcaagaccaggtaaggttcttcgcgttgcatcgaattaaaccacatgctccaccgcttgtgcgggcccccgtcaattcatttgagttttaaccttgcggccgtactccccaggcggtcgacttaacgcgttagctccggaagccacgcctcaagggcacaacctccaagtcgacatcgtttacggcgtggactaccagggtatctaatcctgtttgctccccacgctttcgcacctgagcgtcagtcttcgtccagggggccgccttcgccaccggtattcctccagatctctacgcatttcaccgctacacctggaattctacccccctctacgagactcaagcttgccagtatcagatgcagttcccaggttgagcccggggatttcacatctgacttaacaaaccgcctgcgtgcgctttacgcccagtaattccgattaacgcttgcaccctccgtattaccgcggctgctggcacggagttagccggtgcttcttctgcgggtaacgtcaatgagcaaaggtattaactttactcccttcctccccgctgaaagtactttacaacccgaaggccttcttcatacacgcggcatggctgcatcaggcttgcgcccattgtgcaatattccccactgctgcctcccgtaggagtctggaccgtgtctcagttccagtgtggctggtcatcctctcagaccagctagggatcgtcgccttggtgagccgttaccccaccaacaagctaatcccatctgggcacatccgatggcaagaggcccgaaggtccccctctttggtcttgcgacattatgcggtattagctaccgtttccagtagttatccccctccatcaggcagcttcccagacattactcacccgtccgccactcgtcagcgaagcagcaagctgcttcctgttaccgttcgacttgcatgtgttaggcctgccgccagcgttcaatctgagccatgatcaaactcttcaatttaaaagtttgatgctcaaagaattaaacttcgtaatgaattacgtgttcactcttgagacttggtattcatttttcgtcttgcgacgttaagaatccgtatcttcgagtgcccacacagattgtctgataaattgttaaagagcagtgccgcttcgctttttctcagcggcgcggggtgtgcataatacgccttcccgctacagagtcaagcatttctttgcttttctctgttgagattctcaggagaaccccgccgacccggcggcgtgtttgccgttgttccgtgtcagtggtggcgcattatagggagttattccggcctgacaagcgaaaaatataaaaactttatcgttcgctcacttttcaggcaaaacatcttaaatatagtcttttccgtctaacttatagacaaaaacgagccccgaagggctcgttttatcatttactggacggcgacaatccggtcttcattaacttccaggcgaatcactttacccggaaccaattcaccagacagtatttgctgtgccagcgggttttcgatctgctgctgaattgcacgtttcagaggacgtgcaccatagaccggatcgtaaccgttctcgctcagcagtttcagcgcctcgtcagaaatgtggatttcataaccacgttcttccagacgtttgtacagacgtttcaactgaatctgcgcaatgctggcaatgtgctgttcacccagcggatggaagaccaccacttcatcgatacggttaatgaattccggacggaagttatggcttaccacaccgagcaccagctctttcatgtgcgcataatccagttcaccgaagcgttcctgaatcagatcggaaccgaggttagaggtcataatgacgaccgtattacggaagtcgaccgttctcccttgcccgtcagtcagacgcccatcatccagtacctgcaacagaatgttgaagacatccggatgcgctttttccacttcatccagcaggatgacggaatacggacgacgacgcaccgcttcggtcaggtagccaccttcttcataaccgacatatcccggaggcgcaccaaccaaacgagacacgctgtgtttctccataaactcggacatatcgatacggaccatcgcctcgtcgctatcaaacataaagttcgccagcgccttacaaagctctgttttccccacaccagttgggccgaggaacaggaaactaccaatcgggcgatttggatccgccagccccgcacggctacgacgaatagcgttagataccgcatcaaccgcttcgttctgaccaattacgcgatggtgcagttcttgctccatacgcagcagtttttcgcgctcgctttccatcatgcgagaaaccggaatccccgtccaacgcgccagcacttcagcaatttcggcgtcggtcactttattacgcaacagacgcatagttttgccttcgagctgcgttgcggcttccagttgcttttccagttccgggattttgccgtattgcagttcagacatccgcgccaggtcccccacacggcgagcctgttcaatagcgattttcgcctgttccagttccgctttaatggtctgcgtaccagaaaggcttgccttctctgctttccactcttcttctaactcggagtactgacgttctttgtcgctcagttcttcgttgagcatatccagacgttttttactggcttcatcagactctttcattaacgcctgttgttccagtttgagctggatgatacgacgatcgagtcggtcgagttcttctggtttactgtcaatctgcatacgaatgctggatgctgcttcatcgatcaggtcgatggctttatccggcagctgacggtcagcaatgtagcgatgagacaacgtcgccgctgcaacaattgccgggtcagtaatttgcacatggtggtgcaattcgtaacgttctttcaggccacgcagaatcgcaatggtatcttcaacagaaggctcggcaacaaacactttctggaaacgacgttccagcgcagcatctttttcaatgtactggcgatattcgtcaagcgtcgtggcacctacgcagtgcaattcaccacgcgccagcgccggtttcagcatgtttccggcgtccattgcgccatcggctttacccgcgccgaccatggtatgtaattcgtcgataaataggatgacgttgccttcctgtttggcaagatcgttaagcacgccttttaaacgttcttcaaactcaccgcgatatttcgccccagccaccagcgcgcccatatccagcgccagtacccggcggcctttcaacccttccggcacttcgccgttgataatacgctgcgccagaccttcaacgatggcagttttaccgacgccgggttcaccaatcagtaccgggttatttttagtacgacgttgcagcacctgaatggtacggcgaatttcttcatcacgaccaatcaccggatcgagtttgccctgttcggctcgttcggtaaggtcgatggtatattttttcaaagcctgacgttggtcttcagcaccttgatcgttcacgctttcacctccacgcatttgttcaatcgcttgagtaatgttggcggtggtcgcccctgctgctttcaggatgtcggccagcgtgccgcgagactcaagtgccgccagaacgaacagttcactgctgataaagttatcaccacgtttttgcgccagcttgtcgcaaagattaagaacgcgcaccagatcctgacttggctggacatcaccaccagtaccttcaacctgcggtaaacgatttaatgcctgattgatatctgtgcgcaactggccagcatttatgccagcggatgttaataaaggactaacgctacccccttcctgattcagcagggcgctcattaaatgaagtggttcgataaattggttgtcgtgcccgagtgcaagactttgggcatcggcaagagcaagctggaatttattagtaagacgatccagacgcataactcctcccataacggatcaaagttgctactggagattaaatgaggtcatccctcaattattcaaggttattgaccagattaatgtgaaaagaaaatcacgcgtaccggatcgtcttgattctttaggttatatcagccaaatgaaacttgccatacgaccggtggtcttgtcgcgacgataagagaagaaagtctcattttccgtatatgtacaacggtcgccgccgaaaatttgctcaacacccacgttcgccagacgctgccgggcaagctgataaatatccgccagatacttatcaccatgctgaatgaaagctgcacttgctttagcgtctactgccataaacgcctcgcgaacctccccccccacttcgaacgcgcgtggaccaattgccggccctaaccaggcgagaatattttccggattatcagcaaaacaggaaaccgtctcttccagcacgcctgcgcacagtccacgccagccagcatgagcggcggcgacttccgttcccgctcgattgcaaaacagcacagggaggcagtcggcagtcatcactgcgcaaaccgtgccgggcgtattgctataagaggcatccgcccgtttactggcataaggttcgccagtgagcttaagcacatctttgccgtgtacctgctcaagccagaccggtttagaaggcaaattgcccgcagcaaaaagtcgcttgcgattctcctcaacgtgatccgggttatcgccacaatgggcaccgaggttgagactgtcatacgggggcaagctcacgccgccgatacgagtggagctacaggccgcaacaccttttggctgcggccactgcgggacaatcagcttactcataaccagtccacttcatccttatgttcttcgaaatcggcgcgcatcacctcaatcagctccaccatatcttgtggaataggcgcatgccattccatttcgatgccggagatcgggtgataaagacgcagcatggttgcatgtagcgcctggcggtcaaacttacgcagcgtggagataaatgcttcgctagcaccttttggcggacgcggacggccaccataaaccggatcgcccaccagcggatgagtgatatgggccatatgcacgcggatctggtgcgtacgtccagtttccagacgcaaccgcagacgcgtgtgcacacggaagtgttccatgatgcgatagtgagtcaccgctggtttgcccatcggatgcaccgccatatgggtacgtttggtcgggtggcgactgattggctcgtccaccgtgccacctgcggtcatatgaccaatcgccaccgcttcatactcacgagtaatttcacgccgttgcaaagattcgactaaacgcgtctgagccggaacggtttttgccacaaccatcaggccagtggtgtctttatccagacgatggacgatgcccgcacgcggtacatcggcaatgggtggatagtaatgaagcaacgcattcagtaccgtgccatccgggttacccgcgccaggatgtaccaccaggtcgcgcggtttattaatgataataatgtcttcatcttcatagacgatatccagcgggatatcctgcggttcaaaacgcgcttcttcttcaatctcagcgttgatggcaacctgctcgccacccaatactttttctttcggcttatcacaaactttgccgttaaccagcactcgctggtcgaggatccattcttttattcggctacgactataatccgggaacatttcggccaaagcctgatctaagcgttgaccgagttggttttcggacaccgttgcagtgagctgtactcgttgtgccatatatactgcttcttcgtttatcgttggggttttacggctttgccgtttaatatagtgtgctattgtagctggtcttaaccgggagcaggaacagagaatctcccgtattacattttgaggaaagtcaaaacgtcatgacgcgcatgaaatatctggtggcagccgccacactaagcctgtttttggcgggttgcagcgggagtaaggaagaagtacctgataatccgccaaatgaaatttacgcgactgcacaacaaaagctgcaggacggtaactggagacaggcaataacgcaactggaagcgttagataatcgctatccgtttggtccgtatagccagcaggtgcagctggatctcatctacgcctactataaaaacgccgatttgccgttagcacaggctgccatcgatcgttttattcgccttaacccgacccatccgaatatcgattatgtcatgtacatgcgtggcctgaccaatatggcgctggatgacagtgcgctgcaagggttctttggcgtcgatcgtagcgatcgcgatcctcaacatgcacgagctgcgtttagtgacttttccaaactggtgcgcggctatccgaacagtcagtacaccaccgatgccaccaaacgtctggtattcctgaaagatcgtctggcgaaatatgaatactccgtggccgagtactatacagaacgtggcgcatgggttgccgtcgttaaccgcgtagaaggcatgttgcgcgactacccggatacccaggctacgcgtgatgcgctgccgctgatggaaaatgcataccgtcagatgcagatgaatgcgcaagctgaaaaagtagcgaaaatcatcgccgcaaacagcagcaatacataacagaaacctgaaacacaaaacggcagcccttgagctgccgtttttttattctgtcagttgtgaaactgaagcgatttagtcgctatcgatctcatcaaatatggctcgctttgagatattcctcaagtaaaaaaacatctcttcctgcgatttctcacaaaaaagattcgttgacaaaaagtgacaaaattatgagattttcatcacacattttgacatcaggaacggtatgctgaattcaccaagacgggaagacaagaggtaaaatttatgacaatgaacattaccagcaaacaaatggaaattactccggccatccgccaacatgtcgcagaccgtctcgccaaactggaaaaatggcaaacacatctgattaatccacatatcattctgtccaaagagccacaagggtttgttgctgacgccacaatcaatacacctaacggcgttctggttgccagtggtaaacatgaagatatgtacaccgcaattaacgaattgatcaacaagctggaacggcagctcaataaactgcagcacaaaggcgaagcacgtcgtgccgcaacaagcgtgaaagacgccaacttcgtcgaagaagttgaagaagagtaatcctttatattgagtgtatcgccaacgcgccttcgggcgcgttttttgttgacagcgtgaaaacagtacgggtactgtactaaagtcacttaaggaaacaaacatgaaacacataccgtttttcttcgcattcttttttaccttcccctgaatgggaggcgtttcgtcgtgtgaaacagaatgcgaagacgaacaataaggcctcccaaatcggggggccttttttattgataacaaaaaggcaacactatgacaagcgaaaacccgttactggcgctgcgagagaaaatcagcgcgctggatgaaaaattattagcgttactggcagaacggcgcgaactggccgtcgaggtgggaaaagccaaactgctcagccatcgcccggtacgtgatattgatcgtgaacgcgatttgctggaaagattaattacgctcggtaaagcgcaccatctggacgcccattacattactcgcctgttccagctcatcattgaagattccgtattaactcagcaggctttgctccaacaacatctcaataaaattaatccgcacagtgcacgcatcgcttttctcggccccaaaggttcttattcccatcttgcggcgcgccagtatgctgcccgtcactttgagcaattcattgaaagtggctgcgccaaatttgccgatatttttaatcaggtggaaaccggccaggccgactatgccgtcgtaccgattgaaaataccagctccggtgccataaacgacgtttacgatctgctgcaacataccagcttgagcattgttggcgagatgacgttaactatcgaccattgtttgttggtctccggcactactgatttatccaccatcaatacggtctacagccatccgcagccattccagcaatgcagcaaattccttaatcgttatccgcactggaagattgaatataccgaaagtacgtctgcggcaatggaaaaggttgcacaggcaaaaagtccgcatgttgctgcgttgggaagcgaagctggcggcactttgtacggtttgcaggtactggagcgtattgaagcaaatcagcgacaaaacttcacccgatttgtggtgttggcgcgtaaagccattaacgtgtctgatcaggttccggcgaaaaccacgttgttaatggcgaccgggcaacaagccggtgcgctggttgaagcgttgctggtactgcgcaaccacaatctgattatgacccgtctggaaagtcgcccgattcacggtaatccatgggaagagatgttctatctggatattcaggccaatcttgaaagtgcggaaatgcaaaaagcattgaaagagttaggggaaatcacccgtagtatgaaggtattgggctgttacccaagtgagaacgtagtgcctgttgatccaacctgatgaaaaggtgccggatgatgtgaatcatccggcactggattattactggcgattgtcattcgcctgacgcaataacacgcggctttcactctgaaaacgctgtgcgtaatcgccgaaccagtgctccaccttgcggaaactgtcaataaacgcctgcttatcgccctgctccagcaactcaatcgcctcgccgaaacgcttatagtaacgtttgattaacgccagattacgctcactgctcataatgatgtcggcataaagctgcggatcctgagcaaacagtcgcccgaccatcgccagctcaaggcggtaaatcgggctagagagcgccagaagttgctcaagctgaacattttcttctgccaggtgcagcccgtaagcaaaagtagcaaagtggcgcagtgcctgaataaacgccatattctgatcgtgctcgacggcgctaatacgatgcagccgagcgccccagacctgaatttgctccagaaaccattggtatgcttccggtttacgtccatcacaccagaccacaacttgctttgccaggctaccgctgtccggaccgaacatcgggtgtagccccagcaccggaccatcatgcgccaccagcatggcctgtaatggcccatttttcacacttgccagatcgaccagaatacaatctttcggtaaaggcggtaatttgccaataacttgctcagtaacgtggattggcacactaacaatcaccattccggcatcggcaacaatatcagccgctcgatcccagtcatgttgctccagaatccgcacctgataaccgctgagggtcagcatcttctcgaacaggcgtcccatctgaccgccaccgccgacgataaccaccggacgcagactcggacaaagtgttttaaatcctttgtcgttttcactggagtaagattcacgcatcacccgacgcaaaacatcctcaatcagatctggcggtacacccagagcttccgcctctgcacgacggctggccaacatagatgcctcgcgctccggaacataaataggcagtccaaagcggcttttcacctcgcccacttcagcaaccagttccagacgcttcgctaataaattcagcagcgctttatcgacttcatcaatttgatcgcgtaatgcggtcaattcagcaaccataataaacctcttaagccacgcgagccgtcagctgcccgttcagatcctgatgaatttcacgcagcaaggcatcggtcatttcccagctaatgcaggcatcggttacggatacaccgtatttcatttcactgcgcggttgctcggaagactgattgccctcgtggatattactttcgatcatcagaccaataatactgcgattgccatctttgatttgagcaaccacggattctgccaccgcaggctgacggcgataatctttattggaattaccgtggctgcaatctaccatcagagacgggcgcagtcccgcctgttccatctctttttcacattgcgcaacatccgcagggctatagttcggcgctttaccaccgcgcaggatcacatggccgtccggattcccctgagtttgtagcaacgcaacctgccctgcctggttaatgccaacaaaacggtgcggctgggcggcggcgcgcatagcgttaattgctgttgccagactgccgtcggtgccgtttttaaaaccaaccggcatggaaagcccggaggccatttcacggtgagtttggctttccgttgtacgagcaccaattgcactccagctaaacagatcgcccaggtattgcgggctattcggatctaacgcttccgtcgccagtggcagtcccatattcaccagctcaagcagcaatttacgcgcgatctgcagcccggcttctacatcaaaagagccatccatatggggatcgttaattaaccctttccagccgacagtggtacggggtttttcaaaatagacgcgcattaccagatagaggctatcgctgacctctgcggcaagggctttaaatcgacgagcatattccagagcagtttccggatcatgaatggaacaaggaccacatactaccagcagacgaggatcgcgcccggcgataatatcactaatgcttttacggctgtcagcaatctgggcttcttgttgcaggctcaatggaaaagcggccttcagttgttccggagtcattaaaacctgttcgtcggtaatatgtacgttattcagcgcgtctttttgcatgatggcgatcctgtttatgctcgtttgcgatagttgatcctcagcgaggatgacgtaacgataacacataaagtaaagttttcaatccatatttcgtacatttttatttacacaggcaatttagtcgcgctttcaacccttacctctgtatagataaatttacactccctttgaaaacaatccgctatgctttgaaaaaggagaaagaaatgatgaaaaagtttatcgcccccttgttggctttactggttagcggatgtcagattgatccttatactcacgcgccaaccttgaccagcaccgactggtatgatgtcggtatggaagatgcgataagcggcagcgccataaaagatgacgatgcatttagcgatagtcaggcggatcgcggtctataccttaaaggatatgccgaaggacaaaagaaaacttgccagaccgattttacttatgcccgaggactttccggtaaaagctttcctgccagctgcaacaatgttgaaaatgccagccaactgcatgaagtaggcaaaaaggggctgatgaaaatgccagcacaatacgattaaattaattaaaaccccacaaataaattaaacataagattttactcattgtgttttatttctcacattgatgacggtcgcatgaaaaaatgatattttaatgagcattctgaaaaaatatcgatgcatttcgagcgaagatggtggggatccctgaatgcgtttttctcaccgactgttcttacttctgattctcctgctgacgggagcaccaatactcgctcaggagccttctgacgttgcgaaaaacgtgcgtatgatggtttccggtattgtcagttacacccgctggcctgcgctaagtgggccaccaaagttatgtatctttagttctagtcgttttagtaccgccctacaagagaatgccgcgacatctttgccttatctgcctgtcatcattcacactcaacaagaggcgatgattagtggctgcaatggtttttattttggcaacgagagtccgacattccagatggaattaaccgaacaatatccgagtaaggcgttattattaattgccgaacaaaataccgagtgcattattggtagcgccttttgtctgatcatccacaataatgacgtcagatttgccgtaaacctggatgccttaagccgtagcggtgtaaaggtcaacccggatgtcttaatgctcgcacggaagaaaaatgatggataacgataattctcttaataagcgccccacgtttaaaagagcattacgcaacatcagtatgaccagcatatttatcactatgatgctgatctggttgctgctttccgtgaccagcgtgctgaccctgaaacagtacgcgcaaaaaaacctggcactgacagcagcaacaatgacttacagtctggaagcagctgtcgtttttgccgatggccctgcagcaactgaaacactggcagcgctgggccagcaagggcaatttagtactgcagaagtacgtgataagcagcaaaatattctggcatcctggcattacacccgtaaggatccaggcgatactttcagtaatttcataagccactggctcttccctgcccccatcattcagccgattcgtcacaatggtgaaaccattggcgaagtacgcttaaccgctcgcgacagtagtatcagccattttatctggtttagcctcgccgtactgaccggttgtattctgctggcaagtggcatcgcaattaccctcacccgccatttgcacaatggcctggtagaagcgctgaaaaatatcaccgatgtcgtacatgatgtgcgttccaaccgcaatttttcccgacgagttagcgaagaacgtatcgctgagtttcaccgcttcgctctcgacttcaacagtctgctggatgaaatggaagagtggcagcttcgtttacaggctaaaaatgcgcagcttctacgtaccgcgctacatgacccattaaccgggctggctaaccgcgcagcgtttcgtagcggcatcaacacgttgatgaacaattccgatgcccgaaaaacgagcgcgttactatttcttgatggcgataatttcaaatacatcaatgatacctggggtcatgcgacgggcgatagagtcttgattgaaatcgcaaaacggttagctgaatttggcgggctgcgacataaagcataccgcctgggcggcgatgaattcgctatggtgctctatgatgtacagagcgaatctgaagtgcagcagatatgtagtgcactgacacaaatctttaatctcccgtttgatcttcataatggccatcagaccaccatgacattaagcattggttacgcgatgaccattgagcacgcctctgcggaaaaattacaagagcttgccgatcacaatatgtatcaggccaaacaccagcgtgccgaaaagctggtgagataacaaggatatatcgatatgataaagcacctggtagcacccctggttttcaccagtctaatactgactggctgccagtcccctcagggaaagtttactcctgagcaagtcgccgctatgcaatcttatggatttactgaatccgccggcgactggagcctgggcttaagtgatgccattctgttcgcaaaaaatgactacaaattgctcccggaaagccagcaacagatccaaaccatggcagctaaattggccagcacagggctaacacatgcccgtatggatggacacaccgataactatggtgaagacagttacaacgaaggcttaagtttgaaacgggcgaatgtcgtggccgatgcatgggctatgggtggacaaattccacgcagcaatctcaccacacagggtttaggaaaaaaatatcccatagccagtaacaagaccgcccagggccgcgccgagaaccgccgcgtcgcagtggtgattactaccccttaaaacaccagcaaacagataaaaaagggccagccaattggccagcccttcttaacaggatgtcgcttaagcgaaatcttagttaagacgctctttgatacgagcagccttaccagtacgctcacgcaggtagtacagtttagctttacgaacagcaccacgacgtttgacagaaatgctgtcaactaccggagagtgagtctggaagacacgctcaacgccttcgccgttggaaattttacgaacagtgaatgcagagtgcagaccgcggttacgaatagcgataaccacgccctcgaatgcctgcagacgttttttggaaccttcaacaacccatactttcacttccacggtatcacccggacggaaggaaggtacgtcctgcttcatctgctcttgttcaagttgcttaataatgttgctcataatttaatctcttatcctgggtaaactgatatctcgggggcttacgccatcccatcatgtttatgttgctgttgtgcgtgttccgttttgaactccgccagcaaccttgcttgctcttcagtcagagccaggttttccagaagttcaggtcttctaagccaggtacggcccaggctctgtttcaaacgccagcgacgtatctcggcatggttgccgctcagtaacactggcggaacttccatcccttctaacacctcaggccgcgtatagtgcgggcaatccagcaatccttcagcaaaggaatcttccgttgcgctggcttcatgtcccagtactcccggaataaaccgggaaacggagtcaatcagcgtcattgctggtaactcaccaccactgagaacgtaatcgccgatactccattcttcgtcaatttcggtttggatcacgcgctcatctataccttcgtagcgaccgcacaccagaatcaatttttgattcgttgccagttcgctgacgcccgcttgatcaagcttgcgtccctgtggactcagataaatcacctttgcgccttcacccgccgcggcttttgctgcatgaatggcgtcccgcaagggttgcaccatcattaacatccccggtccgccgccgtaaggacgatcgtccacggtacggtgccggtcatgcgtgaagtcgcgaggactccagctctggatgctcagcaggccatttttaactgcccggccagttaccccgtaatcggtaattgcgcggaacatttcaggaaacaggctaattatgccaatccacatagcgccgtcttttaccgtttatccggtggtttaaaaaccaggatcccaatctacttcgatactacgagtagtgagatcgactttcttgataacctgcccatcgaggaacggtacgagacgttccttgataccaaacgcatctttcaggtttgccttaatgacgagaacgtcattagatccggtttccatcatatcgacgactttaccgagatcgtagccttcagtggttactacctggcagcccatcaggtctttccagtagtagtccccctcttcaagctgaggcagctggctactatccacgacaatttcacaattcgtcagcaggttcgccgcatcacgatcgtcaacgcctttcagcttgatgatcatgtcctgattgtggtgcttccagctttccagctggacttgctgccactgacccgccttctggataaaccagggctgatagtcaaaaatgctttcggcgtcttcggtggaagaaaacactctgagccacccacgaataccgtaagagctacccatttttcccaaaacgatgggatcaacaggtgcttgcgcggtgagttgtttgctcatcatgaccaccgtgacagattaagctgctttgtttacttctttgatcagcgcagcaacgcgatcagaaatagttgcgccctggccaacccagtgagcgatgcgatccagatccaggcgagtgccttcttctttttcgctagcgattgggttgaagaaaccaacgcgctcgatgaagcgaccgttgcgtgcattacggctgtcagcgacaacaacctggtagaacggacgctttttagcgccgtgacgtgctaaacgaatagttaccataacatcctcttgtgtgaataaaacaaccggaccccatcgaggaacggagtccggtgtcatattaaaagcccgaaaattttactcatttttgcgggaattgcaatcaacagttgctaactctgctgtaaaaggccgtcggcggtgcagccagtttggtgccggagtgcgcgcagtcaccggagcgtacacgcagtacgtgaggatgacgagcacatcccggtgccaaaatggcaaacaagccaggccgattagcgaccagggaagcctgggggcatcatacccttcatgcttctcatcatcttcgccattccgcccttcttcattttcttcatcatgcgctgcatgtcgtcgaactgtttcagaagacggttaacgtcctgcacctgcataccgcaaccggcagcaatacggcgtttacggctacctttgatgatttctggcttagcgcgctctttcatcgtcatgctgttgatgatggcttccatacgcaccagcactttatcgtccatctgactcttgacgttatccgggatctgccccatgcccggcagcttgcccatcagactagccatgccgcccatatttttcatctggcgcagctgctcaagaaagtcgttgagatcgaagccgtcaccttttttcagcttgctggctaatttctctgcctgcgcgcggtcaactttgctttcgatatcttcgatcaggctcagtacgtcgcccatgccgagaatacggctcgcgatgcggtccggatggaacggctccagcgcctcagttttctcgccaacaccgaggaacttgatcggtttgccagtgatgtgacgaatagagagcgccgcaccgccgcgggcatcgccgtccactttggtcaacactacgccggtaagcggtaacgcttcattgaatgcttttgccgtattggccgcatcctgaccggtcatggcgtcaaccacaaacagggtttcaaccgggttaatgctcgcatggacttgtttgatctcgtccatcatcgcttcgtcaacgtgcagacgaccagcggtatccaccagcagcacgtcgtagaatttcagtttggcttctttcagcgccgcgttaacgatatctaccggcttctgaccaacatcagaagggaagaaatcaacgcccacctgctctgccagcgtctcaagctgtttgattgccgccgggcgataaacgtcggcagaaaccaccagcactttcttcttgtgcttctcgcgcaggaacttaccgagtttaccaacgctggttgttttaccggcaccttgcaggcccgccatcagtacgaccgcaggcggttgcgcagccaggttcagggtctggttctcttcgcccatcgccgcaaccagttcgttacggactattttgacgaactcctgccccggcgtcaggctcttattaacttcatgaccaaccgctttctcttttacgcgattgataaactcacgcactaccggcagagctacgtccgcctccagcagcgccatgcgcacttcgcgcagcgtatcttttacgttgtcttcagtgaggcgtccacggccactgatattgcgcagcgtgcggctcaaacgatcggttaaattatcaaacattgtctctcgcctggggtggaaacggttggccgcaatcgcgacacatcatcagtattttgccgcagtataacatgaaggcgtctttgttgttatgcaacggttggagcagcgtagtcctgacgctatactgcttctctttcttattgctcaaactgtcgacatcactatgcccgtttttgctctgctcgcgcttgtcgcctactccgtcagtcttgcgctgattgttcccggtctgctgcaaaaaaacggcggctggcggcgcatggctattatttctgcggtcattgcgctggtctgccacgcaatcgctctggaagcccgcatcctgcccgacggtgatagcggacaaaacctcagcctgctgaacgttggtagtttggtcagtttgatgatctgtacggtaatgaccattgtggcttctcgcaatcgtggctggctgctgctacccattgtctatgcctttgcgcttatcaacctggcgctggcaaccttcatgcccaatgaatacatcacccatctggaagctacgcctgggatgctggtgcacattggcttaagcctcttttcctatgccacgctaattatcgccgccctgtacgcgctgcaactggcgtggattgattaccaactgaagaacaagaagctggcgtttaaccaggaaatgccgccattgatgagtatcgagcgtaaaatgttccacatcacgcagattggcgtggtgctgctaacgctcacgctttgcactggcctgttctacatgcacaacttatttagcatggaaaatatcgacaaggctgtgctctctatcgtggcgtggtttgtctatattgtgctgctgtggggacattatcatgaaggatggcgtggacgccgcgtcgtctggtttaacgttgcgggcgcggtaattctgacactggcctacttcggcagccgaattgtccagcagttaatcagctaaacccagaaaaggagtttcccctggaacacatttctactactacgttgatcattattctgatcatcatggtggtcatttcagcctatttttccgggtccgaaaccggaatgatgaccctcaaccgctatcgtctgcgacatatggcgaaacagggtaatcgcagcgccaaacgcgtcgaaaaattgctgcgtaagccagaccgcctgataagcctggtgttaatcggcaataacctggtcaatattcttgcctccgcgctcggcactattgttgggatgcgtttgtacggcgatgcgggcgtggcaattgcgactggtgtgctgacttttgtcgtactggtatttgctgaggtattgccgaaaaccattgccgcgctgtacccggaaaaagtcgcttatccgagtagttttctgctggctccgctgcaaattttgatgatgccgctggtctggttgctgaatgctatcacccgtatgctgatgcgcatgatgggtatcaaaaccgatatcgtggttagcggctctttgagcaaagaagagttgcgcactatcgtgcacgaaagtcgcagtcaaatttcccgtcgcaatcaggatatgctgctgagcgtgctcgatctggaaaaaatgaccgttgatgacatcatggtgccgcgcagtgaaattatcggtattgatatcaacgatgactggaaaagcattctgcgccaactctcccacagtcctcacgggcgcatcgtgctctaccgtgatagcctggacgacgccatcagtatgctgcgagtacgtgaagcctggcggttgatgagcgagaaaaaagagttcaccaaagaaaccatgctgcgcgccgcggacgagatctattttgtgccggaaggtacgccgctcagcacgcagttggtaaagtttcagcgcaacaaaaagaaagtcggcctggtcgtcaacgagtatggagacattcaggggctggtgacggttgaagatattctggaagagattgtcggcgatttcactacgagcatgagcccaacacttgccgaagaggtcacgccgcaaaacgacggtagcgtgattatcgatggcaccgccaacgtgcgggaaatcaacaaagcctttaactggcatctaccggaagatgatgcccgcacggttaatggcgtcattcttgaggcactggaagagatccctgtcgcaggcacccgcgtgcgtattggcgagtacgatatcgatattctcgacgtacaggacaatatgattaagcaggtaaaagtttttcctgtgaaaccgctgcgcgagagtgtggcggagtaacgaaaacggcccggcattcgcatgcagggccgtgaattattacgaaagcagaaattaagcttttgctttcgctacagtaaccatcgccgcacgaatcgtacgaccattcagcgtataacccttctgcataatgcccagtacgttacctggcgcaacgtcatcagattccaccattgcgatggcctgatgcacattcgggtccagtgggacgttagtttcggcgatcacttcaacgccaaacttacgcacaacatccagcatgctcttcagcgtcagctcaatgccttcaaccatcgcagacatatccgggttagctttatcagccacttccagcgcacgatccaggctatcaatcaccggcagcaattcgttgatgaatttctccagcgcgaatttgtgggctttttcaatatccagttcagtacgacgacgcaggttttccatttcggcttttacacgcaaaatgccgtcacgttcacgggtctgggcttcagccagctgagcttcgagattcgcaactttttcatcgcgcggatccacctgctcagcagaagcttctggctcaactgcctcaatctcttcgtgctgatccatgataatttcttccggggcttgcccctcaggcgttttctgttctttactactcatgaatttctccgcgtttttttcgcattcatctcgctaacttcgcttattatggggatcagtttcagggtttcaagggaagcactcacattgtcatcaatcttcgcaacaaggacctcggaaaaatgaataatcatttcaagtgtattggcattgtgggacacccacggcaccccactgcactgacaacacatgaaatgctctaccgctggctgtgcacaaaaggttacgaggtcatcgttgagcaacaaatcgctcacgaactgcaactgaagaatgtgaaaactggcacgctcgcggagattgggcaactagctgatctcgcggtagtcgttggtggcgacggtaatatgctgggcgcggcacgcacactcgcccgttacgatattaaagttattggaatcaaccgtggcaacctgggtttcctgactgaccttgaccccgataacgcccagcaacagttagccgatgtgctggaaggccactacatcagcgagaaacgttttttgctggaagcgcaagtctgtcagcaagattgccagaaacgcatcagcaccgcgataaatgaagtggtgcttcatccaggcaaagtggcgcatatgattgagttcgaagtgtatatcgacgagatctttgcgttttctcagcgatctgatggactaattattagcacgccaacaggctccaccgcctattccctctctgcaggcggtcctattctgaccccctctctggatgcgattaccctggtgcccatgttcccgcatacgttgagtgcacgaccactggtcataaacagcagcagcacgatccgtctgcgttttagccatcgccgtaacgacctggaaatcagttgcgacagccagatagcactgccgattcaggaaggtgaagatgtcctgattcgtcgctgtgattaccatctgaatctgattcatccgaaagattacagttatttcaacacattaagcaccaagctcggctggagtaaaaaattattctaattttacgccagcctctttactgtatataaaaccagtttatactgtacacaataacagtaatggtttttcatacaggaaaacgactatgttggcacaactgaccatcagcaactttgctatcgttcgtgagcttgagattgattttcatagcggcatgaccgtaataactggcgagaccggcgcgggtaaatctattgcaatagatgccctcggtctttgtctcggtggtcgcgctgaagccgacatggtgcgtaccggcgctgctcgcgctgacctgtgcgcccgtttttctctgaaagatacgccagcggctctgcgctggctggaagaaaaccagcttgaagacgggcatgaatgtttgcttcgtcgcgtgatcagcagcgatggtcgctcccgtggtttcatcaacggtacagctgttcctctgagtcaactgcgcgaactgggtcagttgctgattcagatccatggtcagcacgctcatcaattactcaccaaacctgagcaccaaaaattcctgcttgatggctatgccaatgaaacctctctactgcaggaaatgaccgcacgttatcagttgtggcatcaaagctgccgtgacctcgcgcatcatcaacagttaagtcaggaacgcgccgcccgtgcggaactgctgcaataccaattaaaagaacttaacgaatttaatccgcagcccggagagtttgaacaaatcgacgaagagtacaaacgtctggcgaacagcggtcaattgctgaccaccagccagaatgcattggcattaatggccgacggtgaagacgcaaacctgcaaagtcagctttacacggctaaacaactggtgagcgaattgattggcatggacagcaaactgtccggcgtacttgatatgctggaagaagctaccatccagattgctgaagccagcgatgaactgcgccactactgcgatcgtctggatctcgatcccaaccgactatttgaacttgaacagcgcatcagtaaacagattagcctggcacgtaaacatcacgtcagccctgaggcattgccacagtattaccagagcctactggaagaacagcagcaactggacgatcaggccgacagtcaagaaacgcttgcgctggcggtaacgaaacatcatcagcaggcactggaaatcgcgcgcgcattacaccaacaacgccagcaatatgcagaagaacttgcacagctgatcaccgacagtatgcatgcgctcagtatgccgcatgggcagtttacgatcgatgttaaatttgacgagcatcacctgggcgctgacggtgccgatcgtattgagtttcgggtaaccaccaacccaggtcagccaatgcagcctattgccaaagtcgcatccggtggtgaattgtcccgcatcgcactggcaatccaggtcatcacggcgcgtaaaatggaaaccccggcactgatttttgatgaagtggatgtagggattagcggtccaacagcggcagttgtcggcaaactgctgcgtcaactcggcgaaagtactcaggtgatgtgtgttacccacctgccacaagtcgcgggatgtggtcatcaacactattttgtcagcaaagaaaccgatggtgcgatgacagaaacgcatatgcaatccctgaataaaaaagcgcggttacaagagctggcgcgcctgcttggtggcagtgaagtcacacgtaatacactggcgaatgcgaaagaactgcttgcagcgtaaacttttttcctgcttcacggtcagagtaaacagcaaaacgccgtaagaccggaaagcaaaaggttttaaagtgatgaaaggtctattatcatcggcatattacagatgagccacgtactgctcgggcccgaaaaggaatcaaatcactatgcgctgtaaaacgctgactgctgcagcagcagtactattgatgttgaccgcaggctgttccactctggagcgagtggtttaccgtcctgacatcaaccaggggaactatctgaccgctaacgacgtatccaaaatacgtgttggcatgacgcaacaacaagttgcgtacgcattgggtacaccgctgatgtccgatccatttggtacgaatacctggttctatgtcttccgccagcaaccaggtcatgaaggtgtaactcagcaaacgctgacgctgacctttaacagtagcggtgtgttgaccaatattgataacaaacctgcgctgagtggtaactaataataaagttgctctcaaagacgttaaaaaaggtgctcaatgagcaccttttttctgtctgttatttattcgcacttttttctgctcgttgcctgcgaagctctttcggatcggcaatgagagggcgataaatctccacccgatcgccatcatgcacactatcgcttagttttgccggacggctgtaaatgccgactttgtttttagttaaatcgatatcggtacgcaattccagcaagccactggcgcgaatagcttcttcaaccgtcgcgccctcctgcagcgtcactcgctgcaggtactgcttctcaggtagcgcataagccacctcaacggcaattttacctggcactgtaaacctctttcgcacgaaccgtaaaagcctggaccatattagccgccagctctttaaacacgcgaccaaaggcgagttcaatcaacttattggtaaactcaaagtcgagatgaaactcgatacgacacgcctcctggctcagcggcgtaaacttccatccaccaatcaatttcttgaacggcccatccaccagattcataagaatactttggttactggtcaactggttgcgggtagtaaacgttttgctgatcccagccttagagacatctaccgccgcagtcatctgcccaggagtggactccagaatccgacttccggtacaacccggcaaaaactgaggataagactgaacgtcattcactaactgatacatttgctccgcgctgtagggtaccagtgcggtccggctaatctgaggcataacaatttccatcaacaaaaatccaacaaataatatcatttatcctgctgtaaaaaaaacgctatcccggcgctgggtaacatcgggttcatgctaagatagagccttgtcccccgcaggattgatatggggtgttttcgatttcagattaccgatgattcacgacgcttatgacgaagaaaaaagcacataaacctggtagtgcgaccatcgcgcttaacaagcgcgcccgtcacgaatactttatcgaagaagagttcgaagcgggacttgccctgcaaggctgggaagttaaatccctgcgcgcaggaaaagccaatatcagcgacagctacgtccttctgcgtgacggagaggcatttctgtttggcgctaacatcacgccaatggccgtggcctccacgcatgtggtgtgcgatcctacccgtacccgcaagttacttctcaaccagcgcgaactggacagtttgtacggtcgcgtcaatcgagaaggctataccgtagtggcgctctccctgtactggaaaaatgcctggtgcaaagtgaaaatcggcgtcgccaaaggtaagaaacagcacgataaacgtagtgatatcaaagagcgcgaatggcaggtggataaagcacgtatcatgaaaaacgcccaccgttaaacctgcactccaattattgaccagttcctcaccgcgcctccctctccggcggcgcgaatgaacatcttattggctatcacatccgacacaaatgttgccatcccattgcttaatcgaataaaaatcaggctacatgggtgctaaatctttaacgataacgccattgaggctggtcatggcgctcataaatctggtatacttacctttacacattggggctgattctggattcgacgggatttgcgaaacccaaggtgcatgccgaggggcggttggcctcgtaaaaagccgcaaaaaatagtcgcaaacgacgaaaactacgctttagcagcttaataacctgcttagagccctctctccctagcctccgctcttaggacggggatcaagagaggtcaaacccaaaagagatcgcgtggaagccctgcctggggttgaagcgttaaaacttaatcaggctagtttgttagtggcgtgtccgtccgcagctggcaagcgaatgtaaagactgactaagcatgtagtaccgaggatgtaggaatttcggacgcgggttcaactcccgccagctccaccaaaattctccatcggtgattaccagagtcatccgatgaagtcctaagagcccgcacggcgcaagccctgcgggcttttttgtgccctcaatttgtcccgcgaagtccgaagagaactaattaaatccgaaccttttaggcccattgataggcccaacgaaaagctctattgtttacgttgggctaaacgcagggagactccccacctttgaaaacaggatgtagcgatgaaacttaacgacagtaacttattccgccagcaggcgttgattaacggggaatggctggacgccaacaatggtgaagccatcgacgtcaccaatccggcgaacggcgacaagctgggtagcgtgccgaaaatgggcgcggatgaaacccgcgccgctatcgacgccgccaaccgcgccctgcccgcctggcgcgcgctcaccgccaaagaacgcgccaccattctgcgcaactggttcaatttgatgatggagcatcaggacgatttagcgcgcctgatgaccctcgaacagggtaaaccactggccgaagcgaaaggcgaaatcagctacgccgcctcctttattgagtggtttgccgaagaaggcaaacgcatttatggcgacaccattcctggtcatcaggccgataaacgcctgattgttatcaagcagccgattggcgtcaccgcggctatcacgccgtggaacttcccggcggcgatgattacccgcaaagccggtccggcgctggcagcaggctgcaccatggtgctgaagcccgccagtcagacgccgttctctgcgctggcgctggcggagctggcgatccgcgcgggcgttccggctggggtatttaacgtggtcaccggtagcgcgggcgcggtcggtaacgaactgaccagtaacccgctggtgcgcaaactgagctttaccggtagcaccgaaattggccgccagttaatggaacagtgcgcgaaagacatcaagaaagtgagcctggagctgggcggtaacgcgccgtttatcgtctttgacgatgccgacctcgacaaagccgtggaaggcgcgctggccagcaaattccgcaacgccgggcaaacctgcgtctgcgccaaccgcctgtatgtgcaggacggcgtgtatgaccgttttgccgaaaaattgcagcaggcagtgagcaaactgcacatcggcgacgggctggataacggcgtcaccatcgggccgctgatcgatgaaaaagcggtagcaaaagtggaagagcatattgccgatgcgctggagaaaggcgcgcgcgtggtttgcggcggtaaagcgcacgaacgcggcggcaacttcttccagccgaccattctggtggacgttccggccaacgccaaagtgagcaaagaagagacgttcggccccctcgccccgctgttccgctttaaagatgaagctgatgtgattgcgcaagccaatgacaccgagtttggccttgccgcctatttctacgcccgtgatttaagccgcgtcttccgcgtgggcgaagcgctggagtacggcatcgtcggcatcaataccggcattatttccaatgaagtggccccgttcggcggcatcaaagccagcggtctgggtcgtgaaggtagcaagtatggcatcgaagattacttagaaatcaaatatatgtgcatcggtctttaactggagaatgcgaatgaacagcaataaagagttaatgcagcgccgcagtcaggcgattccccgtggcgttgggcaaattcacccgattttcgctgaccgcgcggaaaactgccgggtgtgggacgttgaaggccgtgagtatcttgatttcgcgggcgggattgcggtgctcaataccgggcacctgcatccgaaggtggtggccgcggtggaagcgcagttgaaaaaactgagccacacctgcttccaggtgctggcttacgagccgtatctggagctgtgcgagattatgaatcagaaggtgccgggcgatttcgccaagaaaacgctgctggttacgaccggttccgaagcggtggaaaacgcggtaaaaatcgcccgcgccgccaccaaacgtagcggcaccatcgcttttagcggcgcgtatcacgggcgcacgcattacacgctggcgctgaccggcaaggtgaatccgtactctgcgggcatggggctgatgccgggtcatgtttatcgcgcgctttatccttgcccgctgcacggcataagcgaggatgacgctatcgccagcatccaccggatcttcaaaaatgatgccgcgccggaagatatcgccgccatcgtgattgagccggttcagggcgaaggcggtttctacgccagcagcccagcctttatgcagcgtttacgcgctctgtgtgacgagcacgggatcatgctgattgccgatgaagtgcagagcggcgcggggcgtaccggcacgctgtttgcgatggagcagatgggcgttgcgccggatcttaccacctttgcgaaaagcatcgcgggcggcttcccgctggcgggcgtcaccgggcgcgcggaagtaatggatgccgtcgctccaggcggtctgggcggcacctatgcgggtaacccgattgcctgcgtggctgcgctggaagtgttgaaggtgtttgagcaggaaaatctgctgcaaaaagccaacgatctggggcagaagttgaaagacggattgctggcgatagccgaaaaacacccggagatcggcgacgtacgcgggctgggggcgatgatcgccattgagctgtttgaagacggcgatcacaacaagccggacgccaaactcaccgccgagatcgtggctcgcgcccgcgataaaggcctgattcttctctcctgcggcccgtattacaacgtgctgcgcatccttgtaccgctcaccattgaagacgctcagatccgtcagggtctggagatcatcagccagtgttttgatgaggcgaagcagtaacgccgctcctatgccggaggcgacgctgcgcgtcttgtccggcctacggggatccaggtcggataaggcgtttacgccgcatccgacaatctgtacgtgaacaggaagaaatctatgttggccgggtaaggcggagccgctctccggcaaaaagaatcaataacaattatacgcgtgacccggcgcgggaaatgtcggggcgctctcccaagtgacacactttcgagaggattcaggatggggcaaagtagccaaccacatgagttaggcggcgggctgaagagtcgccacgtcaccatgttgtctattgccggtgttatcggcgcaagtctgtttgtcggttccagcgtcgccatcgccgaagcgggcccggcggtattactggcctatctgttcgccgggctactggtggttatgattatgcggatgttggcggaaatggcggttgccacgcccgataccggtagcttttccacctatgccgataaagccattggtcgctgggcgggctataccatcggctggttgtactggtggttttgggtactggttatcccgctggaagccaacatcgccgccatgatcctgcacagttgggttccaggcattcccatctggttattttccctcgtcattaccctcgccttaactggcagtaacttattaagcgttaaaaactacggcgaatttgagttctggctggcgctgtgcaaagtcatcgctatcctggcctttattttccttggtgcagtcgcaattagcggtttttacccgtatgccgaagtgagcgggatcagtagattgtgggatagcggcggctttatgcccaacggtttcggtgcggtattaagcgcgatgttgatcaccatgttcagctttatgggcgcagaaattgtcaccattgccgccgcggaatccgacacgccggaaaaacatattgtccgcgccaccaacagcgttatctggcgtatttctatcttctatttatgttctatttttgtcgtcgtggcattaattccgtggaatatgcccggactaaaagccgtcggttcttatcgcagcgtactggaattgctcaatattccccatgcgaaattaatcatggactgcgtgatattactttccgtaaccagttgcctgaacagcgcgctgtataccgcgagtaggatgctctactccttaagtcgtcgcggtgatgctcccgcggtaatgggtaaaatcaaccgcagtaaaaccccgtacgtggcggtgttactctccaccggcgcggcattcttaacggtggtggtgaactattacgcgcctgcgaaggtatttaaatttctgatcgacagctccggcgctatcgccctgctggtttatttagtcatcgccgttagtcagttgcggatgcgcaaaattctgcgagcagaaggaagcgaaattcgcttgcgaatgtggctttatccgtggctcacctggctagtcatcggctttattacctttgtgttggtagtgatgctattccgtccggcgcaacagttagaagtgatctccaccggcttattagcgatagggattatctgtaccgtgccaattatggctcgctggaaaaagctggtattgtggcaaaaaacacccgttcataatacgcgctgatcatgatcaggagtcacaccatgaccattacgtctctggatggctatcgctggctgaagaacgatattattcgcggtaattttcaaccggatgaaaaattacgaatgagtttgctgacaagccgttatgcacttggcgttgggccgttacgggaagctcttagccaactggtggcggaacggctggtcacggtggtgaatcaaaaagggtatcgggtggcgtctatgagtgagcaggagctgctcgatattttcgacgcccgcgccaatatggaagcgatgttagtgagtctggcgattgcccgcggtggcgatgagtgggaggcagacgttctcgcaaaagcgcatctgctgagtaagcttgaggcctgtgacgccagcgagaaaatgcttgatgagtgggatctgcgtcatcaggcgtttcatacggcaattgtggcgggctgtggttctcactatttgctgcaaatgcgtgaacggttgtttgatctggcggcgcgttatcgatttatctggctgcggcgaacggtgcttagcgtggaaatgctggaggataaacacgatcagcaccagaccctgactgcggcggtactggcgcgagataccgcgcgcgccagtgagttaatgcgccagcatttactgacgccaattcccattatccagcaggcgatggctggcaattaattactcttccggaatacgcaacacttgccccggataaattttatccgggctttttagcatcggtttattcgcttcgaagattttattgtacagattagcgttaccgtagacctgtttggaaatggcactcagagtgtcgccagacttaacggtataaaactggctggcagtggctggtgtcgccgttttcacctgatcatcgacactggcaataccggaaatattccccaccgcaacaaggattttctccttcgcctcctgactcaggccgtcaccagtgaccgtcgctttgccgtcggcaatttgaatattcactttatcggcatccggtataccggttttgttcagatgctcctgcaccttcttcgcctgatcgtctttatcgtgctgacctgtaaccgcgtcccagagtttttctccggcatctttcacaaaattgaacagacccatagctacctcattcgttaacggaaacactcagaaagtgtagcagaggaacgcggcgcgttaacgccgcggggatgagcacaggtttaatcgcgggtttgcacccagaacgcgtgaatcaaaccggggatatacccaagcagtgtcaacagaatattaataatgaacgcccaaccgaaccctttaccgagcagcacgccgagcggcggcagaatgatggtgatgacgattctccagaaacccatatgtactccctataagaaaattactcattgtttaaaaagagattttatctcttaagcgtagtaattttagcggagcctgccagtttcagcttacgcttttactctcatttacgctgctgaggctggtatatgttgcatttttagtttagagtttacttaatttagaaaatacttaaataaatatgactgaactcgcgcaattacaggccagtgccgaacaggcagcggccttattgaaagcaatgagccaccctaaacgattgctgattctgtgcatgcttagcggttcccccggcaccagcgcgggagagctgacgcgcattaccggactgagtgcctctgcgacaagtcagcatctcgctcgtatgcgggacgaagggcttatcgacagccaacgggatgcccaacgcattctatattccattaaaaatgaggcggtaaatgccattatcgccaccctgaaaaatgtctattgtccgtaaggagtcactatggctttgacaaccattagcccgcatgatgcacaagaattaatcgcacgcggcgcaaagttaatcgatattcgtgatgctgatgaatatcttcgtgaacatattcctgaagcagatctggctccattatccgtgctggaacagagtggtcttccggctaaattacgtcacgagcaaattatattccactgccaggcaggtaaacgcaccagtaataatgccgataaattagcagcgattgccgcccccgcagaaatctttttactcgaagatgggattgatggctggaaaaaagcaggattgccagtagcggtaaataaatctcaacccttgccgttaatgcgccaggtgcagatcgctgcgggtggtttaatattaatcggcgttgtactgggttataccgtaaatagcggtttcttcttattaagtggctttgttggtgccgggttactgtttgcaggaatcagcggtttttgtggaatggcaaggttgttagataagatgccgtggaaccaacgagcttgagaagcgacgccggacgcgccctagcagcgacatccggcctcagtaattagatcaggaaatcgtcgagagatttaccttctgccagcgcctgagcaattggcttcggtgtacggccctgaccggtccaggttttagtttcaccgttaacatcggtgaatttatatttcgccggacgcggctggcgttttttaccagcgcgtggtgcagcagcagagctattacccaataactcttccgggttaattccgtcagctttcatcagctccagccaggtgctaattttttcctggcgctctgccagttcacgctgctgctgttcttcttcttcacgtctttctttagtgacaaccctgaatttttcgagcatttcttcaagaacgtcaatggagaattcgcgagccatcgcacggagggtgcgaatgttatttaaactttgtaacattacggacataataaagaaaaccttttaacgccaaaacaaaaaaagtatttcgtcgcgtagtgtaagcgatcacttattatatttccacaaaatttaatctatttacagtcctgcgcgagattatttcagctgttattttctgaaactctcagaataatttcaagattatatattagccattttgatgagtaatttagattattggtgaacagagcggcgctctctgctcgctaattccgcaagcctgacaaaatcaaagtgaataaaaatgcaatataacagaataaaagaaaacatccatcactggtgctttctgctgttaatgtacattgtctggcataaaaaatgctgaaaatgacccagctactacatacaccgaattctctacgcttatagcgttacctcacccccaaactttcattagtgatattaaaggtaaggccatatctaattgatttaattaaaaataaatcatatcggcatgtaaaaatccacaatgtacaaaaaacgagccgttacggaatattttatctacaaaaactgactaaataaaaatttttcactaattgattagtcatagccagcgatatacgctatgcgaaaatgcagatggcaatgagatccactgctttcatctccattaacatcccattacgcttttattaaggagcattagcatgttcagtccgcagagtcgcttgcgtcatgcagttgcagatacgttcgcgatggttgtttactgttctgtcgtgaacatgtgtattgaagttttcctctccggaatgagcttcgaacagtctttttattccagattggtagcgattccggtgaacatcttaattgcatggccatacggtatgtaccgtgatctgtttatgcgcgcggcacgcaaagttagcccgagcggctggataaaaaatctggcggatatcctggcttatgtgacgttccagagtccggtgtatgtggcgatcttgttagtggtgggcgcagactggcatcagattatggcggcggtcagtagtaacatcgttgttagcatgttgatgggggcggtttatggctacttcctcgattattgccgccgactgtttaaagtcagccgttaccagcaggtaaaagcctgactcttcttttcgcgactggcatcgccagtcgcgtctttaactggcttcgccaaataaaccattcaaataacgttcaagcgcaacacggctactaaagccatgcgggataccgtaatgctcgtgtcgctcgcctgctaaatagagcggaaattgctggtaatgatcgcaagttttaatatcggaagcgggttcagccagtgtgctactgcgttcttttaatgttggatgaattaccagagcggtacgtcccattcgcgcttcgcgattaacatagacataattttccccacggcggtaaccatacgctttctgggttaccacatcgacagtaaaaccgactttttcaagtacgcgcgccacctcgtctggtcgtaaatacatatttgatcctcgttattatcaaccgcgggcctaccttacctgattgcgcattcacaacgctttcagaaaagtccataaagccgcgatgaacctcagttaagaaaattatggtctacactgaaaattacatcgaattctaatgggggatcatatgtttaaccgaccgaaccgcaacgacgttgatgatggcgtgcaggatatccagaatgatgtcaatcaattagctgacagcctcgaatctgtattgaagtcctggggcagcgacgccaaaggggaagctgaagccgcacgcagtaaagctcaggcattgctgaaagaaaccagggcgcgaatgcatggtcgtactcgcgtccagcaagccgcgcgcgatgccgttggctgcgcggattcttttgttcgtgaaagaccctggtgtagcgtgggtacagcagctgcggtaggtatttttatcggcgcactgttaagcatgcgcaaaagctaatgcaaaaatgataataaatacgcgtctttgaccccgaagcctgtcttcggggtttctttttgcctggtgaatcacaaaaatccccctaccccgtcacgctcatatccagggtaatttcgaccactatttgctatatattgtgtggttgaatcttttttcaactacatctagtatctctgtatcaacagagagacaacccgacgcgtatcatcgcgccgtatcttcattttaaacggaaatacgaatcatgcgcattactatttacactcgtaacgattgcgttcagtgccacgccaccaaacgggcgatggaaaaccggggctttgattttgaaatgattaatgtcgatcgcgttcctgaagcggcagaagcgttgcgtgctcagggctttcgtcagttgccggtagtgattgctggcgatcttagctggtctggtttccgtccggacatgattaaccgtctgcatccagcgccacacgcggccagtgcatgagccagctcgtctacttctccagcagctccgaaaacacgcagcgttttatcgaacgtttaggtctgcccgcggtgcgcatcccgctcaatgagcgggaacggattcaggtagacgagccttacatcctgatcgtgccctcttacggcggcggcggtacggctggcgcggtgccacgacaggtaattcgctttttaaacgacgagcacaaccgggcgttgcttcgcggcgttattgcttctggtaatcgcaactttggtgaggcgtatggccgcgccggagatgtgattgcccggaaatgcggcgtgccgtggctgtaccgttttgaactcatgggtacgcaaagcgatatcgaaaacgttcgtaaaggagtaaccgaattttggcaacgacaaccgcagaatgcctgacgcaggaaacgatggattaccacgcgctgaatgcgatgcttaacctctacgatagcgcaggtcgcattcagttcgataaagaccgccaggccgttgacgcctttattgcgacgcatgtgcgtccgaacagtgtgaccttcagtagccagcagcagcgcctgaactggctggtcaacgaaggttactatgatgaaagcgttcttaatcgctactctcgcgactttgtcattacgctgtttacccacgcacacaccagcggttttcgtttccagacattcctcggggcatggaagttttacaccagctatacgttgaagacattcgacggtaaacgttatctggaagattttgccgatcgagtaacgatggtggcgctgacgctggcacaaggcgatgagacgctggcgttgcaactgaccgatgaaatgctgagtggacgctttcagccagccacgccaacattcctcaactgcggtaagcagcagcgcggcgaactggtttcctgttttttgctgcgtattgaagacaatatggagagcattggtcgggcggtaaattccgcactgcagctgagcaaacgcggcggcggcgtagcatttttgctgagcaatctgcgagaagcgggcgcgccaattaaacgtattgaaaatcaatcttctggcgtaattccggtgatgaaaatgctggaagacgcattttcctatgccaaccaactcggcgctcgtcagggggctggtgcagtctatttacatgctcatcatcccgatattctgcgttttctcgacacgaaacgggaaaatgccgacgaaaaaatccgcattaaaacactgagccttggcgtggtgatcccggatatcactttccatctggcaaaagagaatgcgcagatggcgctgtttagcccttatgacgtagagcgagtttatggcaagccgtttgccgatgtggccatcagccaacactatgacgaactggttgccgatgaacgcattcgcaaaaaatacctcaacgcccgtgatttcttccagcgactggcagaaatccagtttgagtccggctatccctacatcatgtatgaagacacggtaaaccgtgctaaccctatcgccgggcgcataaatatgagtaatctctgcagtgaaattttgcaggttaacagcgccagtgagtatgacgagaatctcgactatacccgcacaggccatgatatttcctgcaatttaggtagcttgaatattgcgcacaccatggattcccccgattttgcccgcacggtagagactgccgtgcgcggtttaacggcagtaagtgatatgagtcatatccgcagcgtgccgtccatcgaagccggaaatgccgccagccacgccatcggactggggcagatgaatttacacggctatctggcgcgagaaggcatcgcttatggtagcccggaagcactggatttcaccaatctctatttctatgccatcacctggcatgcactgcgtaccagcatgttgctggcacgcgaacgcggtgaaaccttcgccgggttcaaacagagtcgctatgccagtggtgaatattttagccaatatctgcaagggaactggcagccgaaaacggcgaaagttggcgaactgtttacccgtagcggtattacgttacctacccgtgagatgtgggcgcagctgcgcgacgacgtgatgcgctacggcatatacaaccagaatcttcaggcggtgccgccaaccggttctatctcttatatcaaccatgctacgagcagtattcatccgattgtggcgaaagtagagatacgcaaagagggcaaaacaggacgcgtttactaccctgccccgtttatgactaacgagaatctggcgctgtatcaggacgcttacgaaattggcgcagaaaagatcatcgacacctacgcggaagcgactcgccatgtcgatcaggggctgagcctgacgctttttttccccgataccgccaccactcgcgatatcaacaaagcgcagatttacgcctggcgcaagggtatcaaaacgctctattacatccgcctgcgtcagatggcgctggaaggcactgaaattgaaggctgcgtctcctgtgcactttaaggaatatctatgaaactcagtcgtatcagcgccatcaactggaacaagatatctgacgataaagatctggaggtgtggaatcgcctgaccagcaatttctggctaccagaaaaggtgccgctgagcaacgatattcctgcctggcagacattaactgtcgtagaacaacaactgacgatgcgcgtttttactggcctgacgctgctcgacacgctgcaaaatgttatcggcgcgccttctctgatgcccgatgcactcacgcctcatgaagaagcggtattaagcaatatcagctttatggaagcggttcatgcccgctcttacagtagcattttcagcacgctatgccagaccaaagatgtcgatgccgcctacgcctggagtgaagaaaacgcaccgttgcagcgaaaagctcagattattcagcaacattatcgcggtgatgatccgctgaaaaagaaaatcgccagtgtgtttcttgaatcttttttgttctattccggtttctggctgccgatgtatttttccagccgcggaaagctgaccaataccgcggacctgatccgtctgattatccgcgatgaagcagtccacggttactacataggctataaatatcagaaaaacatggaaaagatatctctgggacaacgtgaagagttgaagagtttcgccttcgatttgttgctggaactctacgacaacgagttgcaatacaccgatgagctgtacgccgaaaccccgtgggctgacgatgtgaaagcgtttctctgttacaacgccaataaggctttgatgaatctgggctacgaaccgttatttcccgcagaaatggcggaagtgaatccggcaatcctcgccgcgcttagcccgaatgccgatgaaaatcacgatttcttttccggtagtggctcctcttatgtgatggggaaagcggttgaaacagaagatgaagactggaatttctgagggtgttattttcaaaaatatcactacccgcagcagggaaataattcccgccaaatagctttttatcacgcaaataatttgtggtgatctacactgatactctgttgcattattcgcctgaaaccacaatattcaggcgttttttcgctatctttgacaaaaaatatcaactttctcgatttgctctcagcccttatatcacgggaaattccggcgatttgctcgcatcaatattcatgccacatttgccatcaggggttgcctcagattctcagtatgttagggtagaaaaaagtgactatttccattgggtaatatatcgacatagacaaataaaggaatctttctattgcatggcaattaaattagaaattaaaaatctttataaaatatttggcgagcatccacagcgagcgttcaaatatatcgaacaaggacttagtaaagaacaaattctggaaaaaactgggctaagccttggcgtaaaagacgccagtctggccattgaagaaggcgagatatttgtcatcatgggattatccggcagcggtaaatccacaatggtacgccttctcaatcgcctgattgaacccacccgcgggcaagtgctgattgatggtgtggatattgccaaaatatccgacgccgaactccgtgaggtgcgcagaaaaaagattgcgatggtcttccagtcctttgccttaatgccgcatatgaccgtgctggacaatactgcgttcggtatggaattggccggaattaatgccgaagaacgccgggaaaaagcccttgatgcactgcgtcaggtcgggctggaaaattatgcccacagctacccggatgaactctctggcgggatgcgtcaacgtgtgggattagcccgcgcgttagcgattaatccggatatattattaatggacgaagccttcagcgcgctcgatccattaattcgcaccgagatgcaggatgagctggtaaaattacaggcgaaacatcagcgcaccattgtctttatttcccacgatcttgatgaagccatgcgtattggcgaccgaattgccattatgcaaaatggtgaagtggtacaggtcggcacaccggatgaaattctcaataatccggcgaatgattatgtccgtaccttcttccgtggcgttgatattagtcaggtattcagtgcgaaagatattgcccgccggacaccgaatggcttaattcgtaaaacccctggcttcggcccacgtagcgcactgaaattattgcaggatgaagatcgcgaatatggctacgttatcgaacgcggtaataagtttgtcggcgcagtctccatcgatagccttaaaaccgcgttaacgcagcagcaaggtcttgatgcggcgctgattgatgcgccgttagcagtcgatgcacaaacgcctcttagcgagttgctctctcatgtcggacaggcaccctgtgcggtgcccgtggtcgacgaggaccaacagtatgtcggcatcattagcaaaggaatgctgctgcgcgctttagatcgtgagggggtaaataatggctgatcaaaataatccgtgggataccacgccagcggcggacagtgccgcgcaatccgcagacgcctggggtacaccgacgactgcaccgactgacggcggtggtgctgactggctgaccagtacgcctgcgccaaacgtcgagcattttaatattctcgatccgttccataaaacgctgatcccgctcgacagttgggtcactgaagggatcgactgggtcgttacccatttccgtcccgtcttccagggcgtgcgcgttccggttgattatatcctcaacggtttccagcaattgctgctgggtatgcccgcaccggtggcgattatcgttttcgctctcatcgcctggcagatttccggggtcggaatgggtgtggcgacgctggttagcctgattgccatcggcgcaatcggtgcctggagccaggcaatggtgactctggcgctggtgttaaccgccctgctgttctgtatcgtcatcggtttgccgttggggatatggctggcgagaagtccgcgagcggcgaaaattattcgtccactgcttgatgccatgcagaccacgccagcgtttgtttatctggtgccaatcgtcatgctatttggtatcggtaacgtgccgggcgtggtggtgacgatcatctttgctctgccgccgattatccgtctgaccattctggggattaaccaggttccggcggatctgattgaagccagccgcagtttcggtgccagcccgcgccagatgctgttcaaagttcagttaccgctggcgatgccgaccattatggcgggcgttaaccagacgctgatgctggccctttctatggtggtcatcgccagcatgattgccgtcggcgggttgggtcagatggtacttcgcggtatcggtcgtctggatatggggcttgccaccgttggcggcgtcgggattgtgatcctcgccattatcctcgatcgtctgacgcaggccgttgggcgcgacagtcgcagtcgcggcaaccgtcgctggtacaccactggccctgttggtctgctgacccgcccattcattaagtaactctgcacttgcccggtgacgccgggcattatcaccctgccaaaaaaaggaataacaatgcgacatagcgtactttttgcgacagcgtttgccacgcttatctctacacaaacttttgctgccgatctgccgggcaaaggcattactgttaatccagttcagagcaccatcactgaagaaaccttccagacgctgctggtcagtcgtgcgctggagaaattaggttataccgtcaacaaacccagcgaagtagattacaacgttggctacaccagccttgcttccggcgatgcaaccttcaccgccgtgaactggacgccactgcatgacaacatgtacgaagctgccggtggcgataagaaattttatcgtgaaggggtatttgttaacggcgcggcacagggttacctgatcgataagaaaaccgccgaccagtacaaaatcaccaacatcgcacaactgaaagatccgaagatcgccaaactgttcgataccaacggcgacggaaaagcggatttaaccggttgtaaccctggctggggctgcgaaggtgcgatcaaccaccagcttgccgcgtatgaactgaccaacaccgtgacgcataatcaggggaactacgcagcgatgatggccgacaccatcagtcgctacaaagagggcaaaccggtgttttattacacctggacgccgtactgggtgagtaacgaactgaagccgggcaaagatgtcgtctggttgcaggtgccgttctccgcactgccgggcgataaaaacgccgataccaaactgccgaatggtgcgaattatggcttcccggtcagcaccatgcatatcgttgccaacaaagcctgggccgagaaaaacccggcagcagcgaaactgtttgccattatgcagttgccagtggcagatattaacgcccagaacgccattatgcatgacggcaaagccagtgaaggcgatattcagggacacgttgatggttggatcaaagcccaccagcagcagttcgatggctgggtgaatgaggcgctggcagcgcagaagtaatttttattcgggcggataaggcgtttttgccgcatccgccgttctgtgcacaatgcctgatgcgacgctggcgcgtcttatcatgcctacaaaccacatcgcacatttcaacaatctatctttcatcccatattcatcaacatccgctattattgatttccagcttaatcatcacctgatgaacaaaaataatgactaaacctaatcatgagcttagcccggcgctgatcgtgctgatgtctatcgccaccggtctggcggtagccagtaactattacgcccagccattgctcgacaccatcgcgcgtaacttttccctttccgccagtagcgcaggctttattgttaccgccgcgcagttgggctatgccgcaggtctactgtttcttgttcccctcggtgatatgtttgaacgccgccgcctgattgtcagcatgaccttactggcggcatgttgattaccgccagcagtcagtcgctggcgatgatgatcctcggtacggcattaaccggtttattcagtgtcgtggcacaaattctggttccgctggcagcgacgctggctagtccggataaacgcggcaaagtggttggcactattatgagcggtctgctgttggggatcttgctggcacggacagttgccggattgctggcgaatctcggcggctggcgcaccgtcttttgggttgctagcgtgttaatggcactgatggcgctggcattatggcgtggtctgccacaaatgaaaagtgaaacccacctcaactacccacagttgttgggttccgttttcagtatgtttatcagcgataaaattctgcgtacccgcgcgttgctgggctgcctgacctttgccaatttcagcattctctggaccagtatggcctttttgcttgccgctccaccttttaactacagcgatggtgtcattggtctgtttggacttgcgggagctgccggagcgttgggcgctcgtccggcgggcggttttgccgataagggcaaaagccaccacaccacaactttcggtctgctgctgctattacttagttggctggcgatctggtttggtcacacttccgtactggcgttgattatcggaatcctggtgctggatctcaccgtgcagggcgtgcatatcactaaccagacggtaatttatcggatacatcctgatgcgcgcaatcgcctgaccgcaggttacatgactagctactttattggcggtgccgccggtagcctaattagtgccagtgcctggcaacatggcggttgggctggcgtttgtctggctggcgcgacgattgccctggttaacttactggtctggtggcgaggttttcatcgtcaggaagccgcaaattaagcaatcagcaaccgttttcgtggctttacacttataagggtgttaagaagcccatcagtctgataaggttaagatattcattcagtctatttataatattaacaatcgttaagcgtacactctatggaaagccctactccacagcctgctcctggtagcgcgaccttcatggaaggatgcaaagacagtttaccgattgttattagttatattccggtggcctttgcgttcggtctgaatgcgacccgtctgggattctctcctctcgaaagcgtttttttctcctgcatcatttatgcaggcgcgagccagttcgtcattaccgcgatgctggcagccgggagtagtttgtggattgctgcactgaccgtcatggcaatggatgttcgccatgtgttgtatggcccgagtctgcgtagccgtattattcagcgtctgcaaaaaagcaaaaccgccctgtgggcgtttggcctgacggatgaggtttttgccgccgcaaccgcaaaactggtacgcaataatcgccgctggagcgagaactggatgatcggcattgccttcagtagttggagtagctgggtatttggtacggtaataggggcattctccggcagcggcttgctgcaaggttatcccgccgttgaagctgcattaggttttatgcttccggcactctttatgagtttcctgctcgcctctttccagcgcaaacaatctctttgcgttaccgcagcgttagttggtgcccttgcaggcgtaacgctattttctattcccgtcgccattctggcaggcattgtctgtggctgcctcactgcgttaatccaggcattctggcaaggagcgcccgatgagctatgaggttctgctgcttgggttactagttggcgtggcgaattattgcttccgctatttgccgctgcgcctgcgtgtgggtaatgcccgcccaaccaaacgtggcgcggtaggtattttgctcgacaccattggcatcgccagcatatgcgctctgctggttgtctctaccgcaccagaagtgatgcacgatacacgccgtttcgtgcccacgctggtcggcttcgcggtactgggtgccagtttctataaaacacgcagcattatcatcccaacactgcttagtgcgctggcctatgggctcgcctggaaagtgatggcgattatataacccacaagaatcatttttctaaaacaatacatttactttatttgtcactgtcgttactatatcggctgaaattaatgaggtcatacccaaatggatagtagctttacgcccattgaacaaatgctaaaatttcgcgccagccgccacgaagattttccttatcaggagatccttctgactcgtctttgcatgcacatgcaaagcaagctgctggagaaccgcaataaaatgctgaaggctcaggggattaacgagacgttgtttatggcgttgattacgctggagtctcaggaaaaccacagtattcagccttctgaattaagttgtgctcttggaagttcccgtaccaacgcgacgcgtattgccgatgaactggaaaaacgcggttggatcgaacgtcgtgaaagcgataacgatcgccgctgcctgcatctgcaattaacggaaaaaggtcacgagtttttgcgcgaggttttaccaccgcagcataactgcctgcatcaactctggtccgcgctcagcacaacagaaaaagatcagctcgagcaaatcacccgcaaattgctctcccgtctcgaccagatggaacaagacggtgtggttctcgaagcgatgagctaacgcgtcatctcgctcaaaaatccagatttataaaagaaaaaatgactggccagcatcgcaacatgctggcctttttggcaagcaggtcggctcagccgatgagttaagaagatcgtggagaacaatatgagcgcaaatgcggagactcaaaccccgcagcaaccggtaaagaagagcggcaaacgtaagcgtctgctcctccttctcaccttgctctttataattattgccgtagcgatagggatttattggtttttggtactgcgtcacttcgaagaaaccgatgacgcatacgtggcagggaatcaaattcaaattatgtctcaggtgtctggcagcgtgacgaaagtctgggccgataacaccgattttgtaaaagaaggcgacgtgctggtcactctcgacccgacagatgctcgccaggcgtttgaaaaagccaaaactgcactggcttccagcgttcgccaaacccaccagctgatgattaacagcaagcagttgcaggcgaatattgaggtgcagaaaatcgccctcgcgaaagcacaaagcgactacaaccgccgtgtgccgctgggcaatgccaacctgattggtcgcgaagagctgcaacacgcccgcgacgccgtcaccagtgcccaggcgcaactggacgtcgcgattcaacaatacaatgccaatcaggcgatgattctggggactaaactggaagatcagccagccgtgcaacaggctgccaccgaagtacgtaacgcctggctggcgctggagcgtactcgtattatcagtccgatgaccggttatgtctcccgccgcgcggtacagcctggggcgcaaattagcccaacgacgccgctgatggcggtcgttccagccaccaatatgtgggtggatgccaactttaaagagacgcagattgccaatatgcgtatcggtcagccggtcactatcaccacggatatttacggcgatgatgtgaaatacaccggtaaagtggttggtctggatatgggcacaggtagcgcgttcagtctgcttccagcgcaaaatgcgaccggtaactggatcaaagtcgttcagcgtctgcctgtgcgtatcgaactggaccagaaacagctggagcaatatccgctgcgtatcggtttgtccacgctggtgagcgtcaataccactaaccgtgacggtcaggtactggcaaataaagtacgttccactccggtagcggtaagcaccgcgcgtgaaatcagcctggcacctgtcaataaactgatcgacgatatcgtaaaagctaacgctggctaatccagaggtgcgtgtgatgcaacagcaaaaaccgctggaaggcgcgcaactggtcattatgacgattgcgctgagtctggcgacattcatgcaggtgctggactccaccattgctaacgtggcgatccccactatcgccgggaatctgggcagtagcctcagccagggaacgtgggtaatcacttctttcggggtggcgaatgccatcagcatcccgcttaccggctggctggcaaagcgcgtcggggaagtgaaactgttcctttggtccaccatcgcctttgctattgcgagctgggcgtgtggtgtctccagcagcctgaatatgctgatcttcttccgcgtgattcaggggattgtcgccgggccgttgatcccgcttagccaaagtctattgctgaataactacccgccagccaaacgcagcatcgcgctggcgttgtggagcatgacggtgattgtcgcgccaatttgcggcccgatcctcggcggttatatcagcgataattaccactggggctggatattcttcatcaacgtgccgattggcgtggcggtggtgttgatgacactgcaaactctgcgcggacgtgaaacccgcaccgaacggcggcggattgatgccgtggggctggcactgctggttattggtatcggcagcctgcagattatgctcgaccgcggtaaagagctggactggtttagtagtcaggaaattatcatccttaccgtggtggcggtggtggctatctgcttcctgattgtctgggagctgaccgacgataacccgatagtcgatctgagcttgtttaagagccgcaacttcaccatcggctgcttgtgtatcagcctcgcgtatatgctctacttcggcgctattgttctgctgccgcagttgttgcaggaggtctacggttacacggcgacctgggcaggtttggcctctgcgccggtagggattattccggtgatcctgagcccgattatcggccgcttcgcgcataaactggatatgcggcggctggtaaccttcagctttattatgtatgccgtctgcttctactggcgtgcctatacctttgaaccaggtatggattttggcgcgagcgcctggccgcagtttatccaggggtttgcggtggcctgcttctttatgccgctgaccaccattacgctgtctggtttgccaccggaacgactggcggcggcaagcagcctctctaactttacgcgaacgctggcggggtctatcggcacgagcataaccacgaccatgtggaccaaccgcgagagcatgcaccatgcgcagttgactgagagcgtaaacccgttcaacccgaatgcccaggcgatgtacagtcaactggaagggcttgggatgacgcaacagcaggcaagtggctggattgcccagcagatcaccaatcaggggctgattatttccgccaatgagatcttctggatgagtgccgggatattcctcgtcctgctggggctggtgtggtttgctaaaccgccatttggcgcaggtggcggcggaggcggtgcgcactaagtacaactaagccagttcatttgaactggcttttttcaattaattgtgaagatagtttactgattagatgtgcagttcctgcaacttctctttcggcagtgccagttcttcgttgctgttgatgcgtacgtcacgttccagaatgctacgcgcaatatcctgcgcttcctgcaagctgtgcatctggtaagtgccacactggtagacgttcagttccgggatctgattctgatcctgcactttcagcacgtcttccattgccgttttccaggcatcagcaacacgctgctcatctggcgtaccaatcagactcatataaaaaccggtgcggcagcccattgggctgatatcgataatctctacaccattaccgttaagatggttacgcataaaaccagcaaacaggtgctccagggtatggatccctctttctggcatcacttctttgttcggcacgcagaagcgcagatcgaacacggtgattgcgtcgccatgcggggtgttcattgttttcgccacccgaactgcaggcgcttccatccgggtatgatcgactgtgaagctatctaacaacggcatttagccacctccggtaatttttttaaaaattttctgaactctttcttcccaggcgagtctgagtatatgaaagacgcgcatttgttatcatcatccctgaattcagagatgaaattttggccactcacgagtggcctttttcttttctgtcaggcgtgtttttccagccacaccgcaaacggttcggtatcagcggcttccatttcctgctgacggcgttcagacgcctcgcgctcggctacaaaatcctcttcgcgcagaatttccagcggctcttcacgcagcagattacggtaggcttctgcaaatgctttgcctgttccgccaataccagtatcaatcatagaccttaagatacgggcagagaaagtcagatcgggattatcgaagcaggcaaccagttcatcacacactttctgatacgcttcgccgccgttaatactatccagcgtttgcgcgacgcgtttcagatcgcggaacagatctttacccacctgcggtaacgggaactgtgcggtttcgcagccgatacccagcgtcagacccggtttgcgaccttcgaggatcacccggttccagttaacgcgtgtacaggcaagttcgctactgctcatttccggtgcatcagccagcgcacaccagaccataaacaggtcgaggaatcgcacctgctgttcatctacaccaatcgggctgaacgggttgatgtccaggctacgcacttcaatatattcaatgccgccacgtaacagcgcatcagaagggctctcgccgctgcgggtaacgcgttttggacgaatcggcgcgtacagttcgttttcaatctgcaacacgttgctgttgatttgcagcctcttaccgtctttctcaataccaatcttcgcgtactcttcgcttggcgttttgattgcctgtttaaggcccgctacgtactcgtaaagatcgttgaaggtaataccaagattgctttggcttttattggtatagccgagatcgctcaaacgaagagaggtcgcatacggcaggtaatacataccgcactcggttttctcaaacggcaggctcgttggttttccttgcaggaaagaagaacaaatcgccggagatgcaccaaacagataaggaatgacccaaccgaaacgatagtaattgcggataacgcggaaatagcccgcagaaattttctctttggcatcagcgccgctgatatcaccgcacttcgcttgccagaatgccattggcaaagagaaattgtagtgcacgccggaaatggtttgcatcagcgcgccgtagcgatttttcagcccttcacgatacagcgttttaaagcgtccggtgttagaagtgccgtactgtgccagttcgatgtcctgaccttctgcgatgtagcatggcatacttaacggccacatccgctcatcgcccatattgcgcgccgtataacgatgcagatcgcgcataaaggtcagcatatgttcaatatcaccatccactggtgtaatgaattccagcaatgcttccgcaaaatcggtagtaatccatttgtgcgtcagtgcggaacctaatgcttcaggatgacctgttgttgccagtgtgccatcagcattaacacgcaaagtttcgcgctccagcccacgctgtatcccctttaacgcctgaggatgtttttccagccaggccagcgcctgacttacgtccgggatcaaattgacctcccgcctgtcaaaatcgttttaattagcataactgtaatggtgaccatatgtgcaggcctacaattagtgccaccacatcatgccctgaacggtcgctgctgcaactgcaacatagcgtaacgctttaccaaggcacaaaaaaaagattaccggtccccagctgatgcgcatccatcccgctaacagacacagtaaatcgccaaccacgggcatccagcttaataatagcgtgactgcaccatagcgtttcagccagccggtagctttctcttgccagcggcttgttttacgcaatggaaagaaacgcccaaggataacgttagttaaccctccaaggctattacccattgttgctgttaaaactaaaacccagggatgactgatcccggaaagcaacattgccaccagcacgacttcggagttgccgggtaatagtgtagcgctgagaaaactactggcaaacaagctgaaaaggcttaacgcttcactcacagcaagcgaacatccacggcgtccatgcctgctgcacgggccgcctgaataccgaaatcggcatcttcaaagaccacacactgcgtcggttgcacgcccatacgctgcgcgcacaacaaaaatgtgtctggcgcgggtttatggtgtttgacgtgatcggcagcgacgacggcgtcaaaataatggcgtaatcccaggtgcgccagcaatgcctcagcgatggcgctttcactccccgttcctacagccattgggcgacgaccatgccaacttttcaccacatcaacaagaggaagcggttcgacgctatccagcagcatacttcttactgcttctgttttttcacgcgctaacgcatgcgggtcgagatcggcctgattcagctcaataattgcctgagcaatacgccaggtggggcttccattaagcgcaatcatcgcctgaatatcgtactgaagaccgtagtgccctaatacttcgcgccacgctttacggtgcgtaggctccgtatccaggattgtgccatccatatcaaaaattaaacctgcataacgctcgtacatggtcttctcgcaagtcgaaaaatatgacgctactttagcgtaattgcttgattttgtcgctgatggcgaaggagaagaaaattcaggaaatggataaaggagttatttagaaatgagatatttttgaaggaaattttttggagaagatggtgcatccgggaggatgactcactgacgttcgcccttcgggccgttgctggcgcaacgttatccttcctggtgcctgcggttaataccgctatctcttcgataccttcattgctgaaggttacggagaatatggtgcatccgggaggattcgaacctccgaccgctcggttcgtagccgagtactctatccagctgagctacggatgcatcgggaaaacttattctactgctgatattgataccgctactaaagccatatcaattaagagatggtgcatccgggaggattactcgccttgcggctcgcccttcgggccgttgctaaagcaacgttatcatccctagtgcctgcggttaattccgctacctcttcgataccttcattgctgaagatttcggagaatatggtgcatccgggaggattcgaacctccgaccgctcggttcgtagccgagtactctatccagctgagctacggatgcatcgggaaatttattttactgctgatattgataccgctactaaagccatatcaagtaagagatggtgcatccgggaggattcgaacctccgaccgctcggttcgtagccgagtactctatccagctgagctacggatgcatcgggaaacttactttactgcagattttttgataccgctactaaagccgtatcaagtaagagatggtgcatccgggaggattactcgccttgcggctcgcccttcgggccgttgctaaagcaacgttatcctccctggtgcctgcggttattaccgccacctcttccataccttcatcgctgaaagtacgtagaatatggtgcatccgggaggattcgaacctccgaccgctcggttcgtagccgagtactctatccagctgagctacggatgcaaatggcggtgaggcggggattcgaaccccggatgcagcttttgaccgcatactcccttagcaggggagcgccttcagcctctcggccacctcaccacacgcctcttacgagtgcttcgaagaacttgtttatcgctcatcgtcgctgcgtggcgcacatattactttctgagacttataagtcaaacaatttttcctacacttttatcgtttgcacacttcacgttcaattagtctgtaaaaacgtcaaaaagagtgttttatcaacagaagaatggaggtctgacagatagtagtaatgcaaaaaaatggagacttaagttgaatgaacgggagtaaagcgaaaagactatagagtgaaggagaaattttgagggtgcgtctcaccgataaagatgagacgcggaaagattagtaactggactgctgggatttttcagcctggatacgctggtagatctcttcacggtgaacagaaacttccttcggggcatttacgccaatacgtacctggttgccctttacccctaaaactgtcacggtgacctcatccccaatcatgagggtctcaccaactcgacgagtcagaatcagcattctttgctccttgaaagattaaaagagtcgggtctctctgtatcccggcattatccatcatataacgccaaaaagtaagcaatgacaaacacattacatctaagcagtcatggcattacattctgttaaacctaagtttagccgatatacacaacttcaacctgactttatcgttgtcgatagcgttaatgcgaatgccgtgaagcgagtccacggcattgcctgacgcttatattattgcaatttcgcgctgacccagcctttcacactggctaacgctgcaggtaaggccgcagcatccgtaccaccggcttgcgccatgtcaggacgtccaccacccttgccgcccacctgctgagcgaccataccaatcagttcccctgctttcacacgatctgtgacgtccttagatacgcctgcaatcagagaaaccttaccttcgactaccgttgccagcacgataattgtgctccccagctgattttttaaatcgtcaaccatggtacgcaacattttcggctcaacaccgctaagctcgctaaccaacagcttaacaccattaacatcaattgccttactggaaagatttgcgctctcctgtgcggcagcttgttctttaagctgttgtaactctttttccagctgacgcgtacgttccagtacactgcgcactttatcagccagattattgctatcgcctttcagcagatgcgcgacttcgcttaagcgatcgctgtctgcatgaacggtggcgatagcaccttctccggttaccgcttcgatacgacgaacgcctgcagcagtaccgctttcagagatgatgcggaacagaccaatatcaccagtgcggctggcgtgagtaccgccacacaactcggtagagaaatcgcccatgctcagcacgcgtacgcgctcatcatacttctcgccgaacagcgccatcgcacctttcgctttcgccgcttcgagatccatgatgttggtttcgatcggcaaattgcgacgaatctgtgtgttcaccaggtcttcgaccgcacgaatctcttctggtttcatcgcttcgttgtgactgaagtcgaagcgcagcaccttgtcgttaaccagactacctttctggcttacatgagtacccagaacctggcgcagcgcagcgtgcatcaggtgcgttgcggagtgattcagacgaatacgggcgcgacgagcctcatcaacatcagcctgcaccgcgtcgcccactttcagagaacccgcagcaagtttaccgatgtgaccaatcgcctggccgtatttctgcgtatcttccaccgcaaaggagaagttagcgcctttcagttcgcctttatcgccaacctgaccgccggattccgcatagaatggcgtttgatccagcacgaccacagcttcctggcctgcattgatggcatcaaccgctttaccatcaacaaacagcgcagtcactttgccgttcagttccagatggtcatagcctttaaattcagatgcactgtcaacacggatcattgcgttgtaatcggcaccaaagccgctggcttcgcgcgcgcgacgacgctgctcttccattgcagcttcaaaaccagcttcgtcaactttgatgttgcgctcacgacaaacatcagccgtcaggtcaaccgggaagccataggtgtcgtacagacggaaagcagtttcaccatccagcgtatcaccagaaagttttgccagctcttcatccagcaacgccagaccgcgctccagagtacgagcaaactgctcttcttcagtcttcagcacctgctcaacctgcgcctgctggcgtttcaggtcttcacccgcagagcccataacgtcgatcagcggaccaaccagtttgtagaagaaggtttctttcgcgccgagcatattaccgtgacgcactgcgcgacgaatgatacgacgcagtacataaccacggttttcattggacggcattacgccatccgcgatcaggaacgcacaagaacgaatgtggtcagcgattacgcgcaggcttttattgctcagatcggttgcgccagtgactttcgctaccgcctggatcagcgtgcggaacaggtcgatgtcatagttagagttaacgtgttgcagcaccgcagcaatacgctccagacccataccggtatctacagacggcttcggcagcggttccatcgtgccatcggcctggcggttgaactgcatgaagacgatgttccagatctcaatgtagcggtcgccgtcttcttccgggcttcccggagggcccccccaaatgtggtcgccgtgatcgtagaagatttcggtgcacgggccgcacggaccagtgtcacccatctgccagaagttgtcagatgcgtatggcgcacctttgttatcgccgatgcgaataatacgttcgcgcgggatccctacttctttttcccagatttcgtaggcttcgtcgtcgctttcatagacggtaacccacagacgctctttcggcagggcaaaccatttttcgctggtcagcagttcccatgcaaactgaatggcatcgtgtttgaaatagtcgccgaagctgaagttgcccagcatttcgaagaaggtatggtgacgcgcggtgtaaccgacgttttccaggtcgttgtgtttaccacccgcacgcacgcagcgttgggaagtggtagcgcgggaataattacgcttgtcgagcccaaggaacacatccttgaactggttcatcccggcgttggtaaacaacaaagttgggtcgttatggggtaccagggagctgctggcaactacctgatgtcccttactatggaaaaagtcgagaaacgcctgacggatctcagcggtgctcttgctcataattatcctgaaatcaagctaacgaaatatcgccaccagctccagcgtgtcttaaccgccgggctggtaactgaaaagtgggaataagataagttttcttgactgggaagtaaaataccgtatgcgttcagtcggcaaaatttcgccaaatctcctggatatcttccatcagatagccacgatagagcagaaaacgctggatcttaactttttcactaaagacagttggcaaaggttcgccatattttcgcgtcgcctgatcgcgcgccagtgcgcaccagtcgatgtcacattcacgcatcgctttttctgtcgcttcgcgggaaatacctttctgattcagttcctggcgaatacgcgcaggtccataacctttgcggctacggctggcgataaagcgcgcaacaaatcggctgtcatcgagatagccatgttcatggcaccaggcaataacgcgctcgtaatcttctgccgtagcatcaatctcttctgggccatttttgcccataatcggtgccgcgagtttacgtcgcagttcttgctcactgtgatcgcgcaccgccagaatgcgtaccgcacgatccaacaggcgagcatatgccgggcgacgggatgtactttctgtcatggcatatccttacaacttaaaaaagcaaaagggccgcagatgcgacccttgtgtatcaaacaagacgattaaaaatcttcgttagtttctgctacgccttcgctatcatctacagagaaatccggcgtactgttcgggttgctcagcagcaactcacgtactttcttctcgatctctttcgcggtttccgggttatctttcagccaggcagtcgcattcgctttaccctgaccgatcttctcacctttgtagctgtaccacgcgcctgctttctcgatcagcttctcttttacgcccaggtcaaccagttcgccgtagaagttgataccttcgccgtagaggatctggaattcagcctgtttaaacggcgcagcgattttgttcttcaccactttcacgcgggtttcgctacccaccacgttttcgccctctttcaccgcgccgatacgacggatgtcgagacgaacagaggcgtagaatttcagcgcgttaccaccggtagtggtttccgggttaccgaacatcacaccaattttcatacggatctggttgatgaagatcagcagcgtgttggactgcttcaggttacccgccagcttacgcatcgcctggctcatcatacgtgccgcaaggcccatgtgagagtcgccgatttcgccttcgatttccgctttcggcgtcagtgccgccacggagtcaacgacgataacgtctactgcgccagaacgcgccagggcgtcacagatttccagtgcctgctcgccggtgtccggctgggagcacagcaggttgtcgatatcgacgcccagtttacgtgcgtagattgggtccagcgcgtgttcagcatcgataaacgcacaggttttaccttcacgctgcgctgcggcgatcacctgcagcgtcagcgtggttttaccggaagattccggtccgtagatttcgacgatacggcccatcggcagaccacctgccccaagcgcgatatccagactaaggctaccggtagagatggtttccacatccatggaacggtcttcacccaggcgcatgatggagcctttaccaaattgtttctcaatctggcccagtgctgccgccaacgctttctgtttgttttcgtcgatagccatttttactcctgtcatgccgggtaataccggatagtcaatatgttctgttgaagcaattatactgtatgctcatacagtatcaagtgttttgtagaaattgttgccacaaggtctgcaatgcatacgcagtagcctgacgacgcaccgcatcacggtcgccgctgaagcattcccgccgggtaatgccttcaccgcgggcagtggcaaaagcaaaccagacggtgccgacaggcttctcttcactgccgccatccggcccggcgataccactaatagacacggcataatcagcacgagccgctttcagtgcgcctatcgccatttccaccacgacgggttcactcaccgcgccatgctgcgccagcgtctcttcgcgtacgccgatcatctgcgctttggcttcgttactgtaggtgacaaatccgcgttcaaaccaggcggagctaccggcaatatcggtaatcactttcgctacccaaccaccggtacaagactcggcagttgttacggttgcgccacgggctttcagcgcctgcccaacctgttcacttaactgcatcagttcactgtcagtcatcacaacctctgtcagtcaaaaatttatgccggacaagatagcactttcgtcaggaagatggtgttggcgttgcaattttacgaggaggattcagaaaaaagctgattagccagagggaagctcacgcccccctcttgtaaatagttactgtactcgcgccagcgccacggcttgtcctaactgccagaccgccattgcgtaatgggtgctgtggttgtaacgggtgatggtgtagaagttcggcagaccgtaccagtactggtagccggtgccaacatccagacgcagcaggctggcttgttgatggttgcccagcggctgctgtggcgttaaacctgcggcggcaagctggctaatgctgtacttagttttgaagccatttggcaagcctggagcctgaccgtttgccattaccgcgacctgatcgcctttcacccagccgtgcgctttgaaatagttcgccacgctaccgatcgcatcaaccggatcccacaggttgatatgcccgtcgccgctgaaatctaccgcatattgtttgtaagagctcggcataaactgtccgtagcccatcgccccggcaaaggaacctttcagattgagcggatcgtcctgctcgtcgcgcgccatcaacaggaaggtttccagctcgccagagaaatactccgcgcggcgtgggtagttaaaactcagcgttgccagcgcatcgaggatgcgagttttccccatcacgcgcccccagcgggtttcaacgccgataatcccgacgataatttccggcggtactccatacacctgccacgcgcgattcaacgcatcttcatactgattccagaaaaccacaccgttctgcacgttgtccggcgtaataaattttttgcgataacggagccatgcgccgttcggaccacttggcggtttcacgcttgtggttggtgcctggttatccatcagccgcagtacgctatccagacgcttcgcctgggagagaatttcctgcaactgctgacgatcgaaaccgtgtttgttcaccattttgtcgatgaactgctgggcattcgggttattagcgaaatcgccgcccatctgcatcacattgtgctgcggctcaagcaggaagccgccagacggcgttccggtggtcgtatcagtctcagtaggttttggcttgctgctacaggcggcaagcaacacaaaaaggggaagcaatgttacataacgacgcttgaacatgaggggtccatttaacagattcaaccaggggcaagtatggtaaagcatcacgccccgcacaaggaagcggtagtcactgcccgatacggactttacataactcaactcattcccctcgctatccttttattcaaactttcaaattaaaatatttatctttcattttgcgatcaaaataacacttttaaatctttcaatctgattagattaggttgccgtttggtaataaaacaataaatcctgaaggagagaacaatgatagaaaccattactcatggtgcagagtggtttatcgggctgttccaaaagggcggagaggtgtttaccgggatggtgaccggcattcttccgctgttgattagcctgctggttatcatgaacgcactgattaattttatcggtcagcatcgtattgaacgttttgctcaacgttgcgccggtaaccctgtttcccgttacctactgttaccgtgcattggcacgtttgtcttttgcaatccgatgaccctaagcctgggtcgctttatgccggaaaagtacaaacccagctactacgcggcggcctcttatagctgccacagtatgaatggcctcttcccccatatcaaccctggcgaactgtttgtttatcttggcattgccagcggtctgacaacgctgaacctgccacttggcccactggcggtgagttatctgctggttggtctggtcaccaatttcttccgcggctgggtgaccgatctgaccaccgccatttttgagaaaaagatgggcattcaacttgaacaaaaagttcacctggcaggagcaacaagttgaaataacacctggcaggagcaacatcatgacgcatattcggatcgaaaaaggaacgggtggctggggcggcccgcttgagctgaaagccacgccgggaaaaaaaatcgtctatatcaccgccggtacccggcctgcgattgttgacaaactggcacagcttactggctggcaggctattgacggatttaaagaaggtgaacccgcggaggcggaaattggtgtcgcggtaatcgactgtggcggcacattacgctgcggcatctatccgaaacgacgtattcccaccattaatatccacagcacgggcaagtccggtccgctggcgcagtacattgtggaagatatttatgtctctggcgtaaaagaagaaaacatcactgtagtaggtgatgcgacaccacaaccctcttccgtgggccgtgactatgacaccagtaagaaaatcaccgaacaaagcgatggtttactggcgaaggtgggaatgggcatggggtccaccgttgcggtgctgtttcaatctggtcgtgacaccatcgacactgtattaaaaaccattctgccgtttatggcattcgtcagcgcgctcattggcatcattatggcttctggccttggtgactggattgcccacggtcttgctccgctggcgagccatccactgggtctggtcatgctggcgctcatctgttccttcccactgcttagtcctttcctcggcccaggcgcagttatcgcacaggttatcggcgtattgattggcgtgcagattggtctcggcaatattccgccgcatctggctttaccggcactgtttgccatcaacgcgcaggcggcctgcgacttcatcccggtcggtttgagcctggcggaagcccgtcaggacacggttcgcgtcggtgtcccttctgtactggtgagccgctttttaaccggcgcgccgactgtactgatcgcctggtttgtctccggttttatctatcaataaaggctgaaacatgaccgttatttatcagaccaccatcacccgtatcggcgcgagtgccattgacgccctcagtgaccagatgctcatcacctttcgtgaaggcgcgcctgcggacctcgaagagtattgcttcattcattgccacggcgagttgaaaggtgcactccatcccggtttgcaatttagtctcgggcagcatcgctatccggtgaccgctgttggcagcgtggcggaagacaaccttcgcgaactgggtcatgtcaccctgcgcttcgatggtttaaacgaagcggaatttccgggcactgtccatgtggcaggccctgtccccgacgatatcgcgccgggaagcgttttgaagtttgaatctgttaaggagtaaaaaatgaatcaggttgccgttgtcatcggtggtgggcaaaccttaggcgcgttcctgtgccacggtctggctgccgaggggtatcgcgtcgcggttgtcgatattcagagcgacaaagccgcaaatgtggcacaagaaattaacgccgaatatggtgaaagtatggcgtacggttttggtgctgacgccactagcgagcaaagcgttctggcgctctctcgtggggtagatgaaatctttggtcgcgtggatttgctggtctacagcgccggaatagcaaaagcagcctttatcagcgacttccagctcggcgattttgaccgtagcctacaggtgaatctggtgggttatttcctgtgtgcgcgtgaatttagccgtttgatgatccgcgacgggattcaggggcgcattattcagatcaacagcaaatccggcaaagtgggcagcaaacacaactctggctacagcgcagcgaaatttggtggcgtcgggctgactcaaagtctggcgctggatctggcggagtacggcattacggtgcatagtctgatgctcggtaacctgctgaaaagcccgatgttccagagtctgttgccacaatacgcgaccaagctgggtatcaaaccggatcaagtcgagcagtattacatcgacaaagtaccgctcaaacgcggctgcgattatcaagatgtgctgaatatgctgctgttctacgccagtcctaaggcgagctactgcaccggacagagcatcaatgtcaccggcggtcaggtgatgttctgatcaacagcggagatccattaaggatctccgtgagactatagaatgcctgatgcgctacgctcatcaggcatacaggacttccgccactacattaaggaaaagttatggtatccgcactcatcaccgtcgccgttatcgcctggtgtgcgcaactggccttaggcggctggcaaatttctcgttttaaccgtgccttcgacacactatgccagcaagggcgggttggcgtgggccgttccagcgggcgctttaaaccgcgggtcgtggtcgccatcgcgctggacgatcagcagcgcatcgtcgacaccttgtttatgaaaggactgaccgtcttcgcccgaccgcaaaaaattcccgcaattaccggtatgcatgcgggtgatttacagcccgatgtgatctttccccatgatccactaagtcagaatgctctaagtttggcgcttaaactgaaacgtggataatttcgttgtgaatgttacttgcttgcgaagttatcattttgaaacctaaatcaggtaatcacgcccatgaaacctcgtcagcgtcaggccgccattctggagtatctgcaaaagcagggtaaatgcagcgttgaagaattggcgcaatactttgacaccacaggcacaaccattcgcaaagatctggtcattctggaacatgccggaaccgtcattcgtacttatggcggagtggtgttgaataaagaggaatccgatccgcctatcgatcataaaacactcatcaacacccacaagaaagagctgattgcagaagctgccgttagttttatccatgatggcgatagcatcattcttgatgctggcagtaccgttttgcagatggttcccctgctcagccgctttaataacatcacggtgatgaccaacagcctgcatatcgtcaatgcgctatccgaactggataacgaacaaactatcctgatgccaggcggaacgtttcgcaaaaaaagcgccagttttcacgggcaactggcagagaatgccttcgagcatttcaccttcgataaattgtttatgggcaccgacggcatcgatctcaatgcgggcgtaaccacctttaacgaggtttataccgtcagtaaggcaatgtgcaatgccgcgcgcgaagtgattttgatggcggacagtagtaagtttggccgtaaaagccccaacgtagtttgcagtcttgaaagcgtcgataagctgattaccgacgcaggtatcgatccggcgtttcgtcaggcgctggaagagaaagggatcgatgtgatcataaccggagagagcaatgagtgaagcactactgaacgcgggacgtcagacgttaatgctggagttgcaggaagcaagccgtttaccggaacgtctgggcgatgattttgttcgcgccgccaatatcatcctgcactgtgaaggcaaagtggtggttagcggaattggcaaaagcggccacattggtaagaaaatcgccgcaacgcttgccagtaccggcactccggctttttttgtccatccggcagaagcgctgcacggcgatctggggatgatcgaaagccgcgatgtgatgctgtttatctcttactccggtggcgcgaaggaactggatctgattattccgcgtctggaagataaatctatcgcgctgctggcgatgaccggcaaaccgacgagtccgctgggcctggcggcaaaagcggtgctggatatctccgtagaacgcgaagcctgcccgatgcaccttgcgccgacctccagcaccgtcaataccctgatgatgggtgacgcgctggcgatggcggtcatgcaggcgcgcggatttaatgaagaagattttgcccgctcccacccagccggggcactgggcgctcgcttgctgaataaagtgcatcatctgatgcgccgtgacgatgccatcccacaggtggcgttaaccgccagcgtgatggatgcgatgctggaactcagccgcaccggtctggggctggtggcggtatgtgacgctcaacaacaggtacaaggcgtctttaccgacggcgatttacgtcgctggctggttggcggcggcgcactcaccacgccagtcaatgaagcgatgacggtcggcggcaccacgttgcaaagccaaagtcgcgccatcgacgccaaagagatcctgatgaagcgcaaaatcactgccgcaccggtggtggatgaaaacggcaaactcaccggcgcaataaacctgcaggatttctatcaggccgggattatttaatccttcaatcccagacgtttcgccagccgatgcaggttggcgacgtcggtttccagcatccgcgcgcaggcagcccagttgtgatgattttgtgccagtgcctgacgaatagtttcacgctggaacgcttctgtcgcttcacgcaggttttgcttaacaacgggcaccgccgccacttctggcgtcggcaacgtcacctcaggaaaagcaaaatgttgcgcctcaagaatcacttcatcgccgctgcgggtggctctcgccagaactaccgcccgatgaatagcatgttccagttcgcgcacgtttcccggaaaactgtagtgttgcagtaaatttcgcgctccggcacttaataccacgcgggagagcccctgccgcaaacgacactgctcgcagaaataccccgccagcagaatgacatcatcgccccgctcacgcagcggcggcacgctaagtggaaacacgctcaggcgatgaaacaaatcggcgcggaatcgccctgccagcacctcttcgcgtaaatcgcggttagtcgccgccagcacgcgcacatcgacccgcaaacaacggtcatcgccaacgcgctgaatatcgccatactgcaacaccctcagcagcttggcctgcaatgccaagctcaactcgccgatctcatccagaaacagcgtgccgttatccgccatttcaaacttcccgctgcgattactgatagcgccagtaaacgctcctttcacatgcccgaacaactcactttccgccacactttccggcagtgcagcacagttgagatagaccagcggattcaccgcccgtgggctggcttcatgaatcgctttcgccaccagctccttaccggttccagtctcaccgctgatcaggacgttgagatcggacgccgccacaatctcaatctcttttttcagttgcgtcatgccaggggacaagccaatcatctgcgtctgtttcaccgcttcaaacggcgtggcatcgcctggcagcatattctggctttccagttgttcaatcagcaacgcattgcttaacgctcccgccgccagcgcagcaatcagccgtagctcttcgtcgctgaaaacatcgaactgatcgggctgcatcccgtcgagcgtcagtgcgccgatcaggttttgcccggcaaacaatggcagaccaacgcaggcgtgaaccttcagactctcctgcccaggaatcaaaccgtcatagggatcgggcaattcgctgtctgcgggaaagcgcaccacatccccggcgcgggcaatcgcttccagccgtggatgcccttccagcgcaaagcgtctaccgagtacatcctttgccagaccgtcgatggcaagcggaataaactgccggctatcgtaacgtagcaacgcagacgcatcgcactccagcacctgacgtagcgtggtgatcaggcgctgaaaacgatcctggtgaccaatcccacgctgcaattcgatggcgatattcgccagcacatcaacggaaaaactcatctttgcctcactgtcaatttgactatagatattgtcatatcgaccatttgattgatagtcattttgactactcattaatgggcataattttatttatagagtaaaaacaatcagataaaaaactggcacgcaatctgcaattagcaagacatctttttagaacacgctgaataaattgaggttgctatgtctattgtggtgaaaaataacattcattgggttggtcaacgtgactgggaagtgcgtgattttcacggcacggaatataaaacgctgcgcggcagcagctacaatagctacctcatccgcgaagaaaaaaacgtgctgatcgacaccgtcgaccataaattcagccgcgaatttgtgcagaacctgcgtaatgaaatcgatctggcggatatcgattacatcgtgattaaccatgcagaagaggaccacgctggggcgctgaccgaactgatggcacaaattcccgatacgccgatctactgtacagccaacgctatcgacagcataaatggtcatcaccatcatccggagtggaattttaatgtggtgaaaactggcgacacgctggatatcggcaacggcaaacagctcatttttgtcgaaacaccaatgctgcactggccggacagcatgatgacttacctgacaggcgacgcggtgctgttcagtaacgatgctttcggtcaacactactgcgacgagcatctgttcaacgatgaagtggatcagacggagcttttcgagcagtgccagcgttactacgccaatatcctgacgccgttcagccgcctggtaacaccgaaaattaccgagatcctgggctttaacttaccagtcgatatgatagccacttcccacggcgtggtatggcgcgataacccgacgcaaattgtcgagctgtacctgaaatgggcggctgattatcaggaagacagaatcaccattttctacgacaccatgagcaataacacccgcatgatggctgacgctatcgcccaggggattgcggaaaccgacccacgcgtggcggtgaaaattttcaacgtcgcccgaagcgataaaaacgaaatcctgactaatgtcttccgcagtaaaggcgtgctggtcggcactagcacgatgaataacgtgatgatgccgaaaatcgccgggctggtggaggagatgactggtttacgcttccgtaacaaacgcgccagtgctttcggctctcacggctggagcggcggtgcggtggatcgtctttccacgcgcctgcaggatgcgggtttcgaaatgagccttagcctgaaagcgaaatggcgaccagaccaggacgctctgaagttatgccgtgaacacggtcgcgaaatcgcccgtcagtgggcgctcgcgccgctgccgcagagcacggtgaatacggtagttaaagaagaaacctctgccaccacgacggctgacctcggcccacggatgcagtgcagcgtctgccagtggatttacgatccggcaaaaggcgagccaatgcaggacgttgcgccaggaacgccgtggagtgaagtcccggataacttcctctgcccggaatgctccctcggcaaagacgtctttgaagaactggcaagcgaggcaaaatgagtaacggcattgtgatcatcggtagcggcttcgccgcccgccaactggtgaaaaatattcgcaaacaggacgccactattccattaaccctgattgccgccgacagcatggatgagtacaacaaacctgacctcagccatgttatcagtcaggggcaacgtgccgatgaccttacccgccagacggcgggtgaatttgccgagcagtttaatctgcacctgtttccacaaacctgggtgacggatatcgatgccgaagcccgtgtggtgaaaagccagaataatcagtggcaatacgacaagctagtactggcaaccggtgccagtgcctttgtcccgcctgtgcctgggcgtgagttaatgctgacgttaaatagtcagcaagagtatcgcgcctgtgaaacgcaactgcgggatgcccgacgcgtgttgattgttggcggtggtttgattggtagcgaactggcgatggatttttgtcgtgcaggcaaagcggtcacgctaatcgacaacgctgccagtattctggcgagcttaatgccaccggaagtaagcagccgcttgcagcatcggttgacggagatgggcgttcatctgctgttgaaatctcagttacaggggctggaaaaaacggattctggcattcaggcaacgctggaccgccagcgcaatatcgaagtggatgcggtaattgccgccaccggactgcgcccggaaaccgccctggcacgacgcgccgggctgacgattaatcgcggcgtttgcgtcgatagttatctgcaaaccagtaataccgatatttacgcgctgggcgattgcgcggaaattaacggtcaggtattgccgttcctccagccgattcaacttagcgcgatggtgctggcaaaaaatcttctcggcaataacacgccgctgaaactcccggcgatgctggtgaaaatcaaaacgccggaattaccgctgcatctggcaggcgaaacccagcgtcaggatttacgctggcaaattaataccgaacgccagggaatggtggcgcgcggcgttgacgatgctgaccagcttcgcgcctttgtggtcagtgaggatcggatgaaagaggcatttggattgttgaaaacattgccgatgtaagtgggctactgtgcctaaaatgtcggatgcgacgctggcgcgtcttatccgacctacggggacgcatgtgtaggccggataaggcgtttacgccgcatccggcaatggtgtccaaatgcaacacgttttatccgttctggacttcacccgctaaccaacgcgccgcagcaataaccccctgccccagagacaaaccgccatcacccgccggtaaactctgtggaaagagcaatgtgaaatcagcgagataatgcgccagacgtgcacgcagcaaacggttatgaataaccccgccgctaaataccagcgtagtgataccacgcatcgtggcctgctcacgcatcaacgcggcaaaaccctgcgccagcgcatcatgaaacgcccacgcgcgttgattaaccggtgcctgccagttcagccactgctgccagaaagtggcgagatccagttgattgtccacccgcggcattgtcaccggatgcgtcactccgtggcaactggctgcgagcgcctccagagcacaagccgcttcaccttcataacttaacgtggctggcgcacagcccagtgccgccgccactgcatcgaaaaaacgcccacagctactcgccagcggcgcgttaattccacgctcaatggcccgcgccagcacgctccagttttgctgttgcacacttgctgtttcagagtaattctgccactccggcacaaagcgcaggcactgcgccagcaggtttcgccacggctgcttcgctgccaaatcgccacccggaagcgccactgcaggcaagccgcccaggtgctcacattcgcgatagttcacccgcaggcactcgccgccccacaaagcgccgttctcccccataccgataccgtcgagcgtcaaagcaatgacatcaccgccatccagcggccactgatgctctgccagacacgccgctgcatgggcatgatgatgcagtaccgtttgcgtcggcagattcatttcacgcgcccactggctggagacatagcccggatgcgcgtcatgcacaacgtattgcggggtaaaatcgtagatgttttgcatcaggcgtaacgcttcgcgccactgcatctggatgccatcgtcacttaaatcgcccagatgctgactcaacaccgcttgttcaccgcgcaccaggcagaaggtatttttcagatccgcgccgagacacagcacaggcggaacatttttaaagcccggaggcaaagccagcgcatccggcacatacccccggctacggcgcagcatttcgccgctttcgcgcaccacgctatcatccatccgctgcacgatgtcgcggttatgtatcaagaatccgtcggcaatgccctgcaaatccgccagcgcctgttcgttgctgatagctggtggtttaccgctcaggttgccggaggtcatcaccagcgggcattgcagttcctgtaacagcaaatgctggagcgggttcgcaggcaacattaccccgacttcgttaaggtcaggggcgatatcatcacaaagctcaggaacgtattttttatccaccagcacaatcggcgcggcgggcgtggtaagcaactggcgcgcagcgtctggtaaaccgtcagccactggcaacatgaccgccagcggtttcgccgggcgatgtttgcgcgcccgaagtgtcgccaccgcgttactgttacgtgcatcgcaggcaagatgaaatccgccaatccctttgatggcgacaattttgcccatttttaactgtgcgatagctgcctgtaatgccgcctcttgttccgcatgttcaccatgacttacccattcaagatgcgggccacactccgggcaggccaccggctgggcgtggaagcgacgatcgagcgggtcacggtactctttgtcacaggccggacatagcggaaacgccgccatcacggtaaacgggcggtcgtaaggcatggcgcgaataatggtgaaacgcgggccgcagtgggtacagttgataaacggataacgataacgccgttcgcctggggtattcatttcggcaaggcaagcagggcaagtagcggcatcgggaacaatttgcgtattcatggtgccgcctgtgctctggcgtatagtgaactcggtgggcagttgactccagataaacggctcacgctcgacgctatcaatacgcgccagcggcgggcagtgctgatacaattgaacaagaaacgtttccgggtcttcccgcagccggacttctacgccatcgccgtcattacagacatcgccgtgaagatttaattgctgtgccagctgccagacaaacggacgaaaaccgacgccctgcactttgccacgaatacgcagttggacaccgcaagatgtgttttttgccattgagttattcccgccatcatgaattgcgtaacccgccctgccggacacgacagcgtcgcatccggcagtcacaggtcggcgataccgcccgctccgtattctacgaatatttccgggaattcctttgatgccagaacagttctgtaagatttttagaacatcagcgccgtacggcggcgtttttctgcgctcagttgttcaagtttattacgatcgacacaaatcagcgcatgagtcgggcaagccgccatacacgccgggccgtcttcacgatggttgcacaggtcgcatttattggcttcggctttgtcagcccgtacattcagacccgcgccgctgttgcggatcaccggacgtaccaccacttccatcgcaccatacgggcaagccacaacgcaggttttgcaaccaatgcaacgttcctgcatcacatgaacaaaccctttatcacggctgatagcaccattcgggcagacgttagcgcacggtgcatcttcacactgacggcaaactgtcgccgtggaaatgttcacacctttaatgacatggatacgcggtaaaaaagtttccggggtcaggcttgcacagtcctgattttcctgatgagaaaccacgcacgctacttcacaggtacggcaaccaatacatttactcgcgtcagcaatgatgaaacggttcatcaaattctccagcaatgacagttaatgcgccgatacattcacaaatcatgccagtttttaatttactgttatttaaggaaattaatttctgtaatgcaggaaaaacgatgtcatcgacactagtgacgatgacatgtgatgacaatgtttatcggctaggagcaatgagactgtcgcggcggatcagttttccgctgaaggttttcggcggactgaaatccccgccatcgagcataaaaatcagccgtccaataatttcctgaatcatctcagtcaccggaatttttacgctggagagcgccggaacggtgtagggggcaatagcgatatcatcgaatccgataacactcacctgctctggcaccgctacgccgcgctcgtgtaacgctttcatcgcacctatcgccatatcgtcgttactggcaactaacgcgctaaatttagccccacgttcgagcaacatttctaccccttcggccccgctggcaggcgtccatttaccgttagcgataagtttttcattgagcgcaataccatgctgcgccagcgcgtctttatacccggcaagacgttcaatgctggtgggggaatccatgctgccggtaaggaaagcaatctcctgatgcccggcgtttatcaactctgccacggcgttaaaactggtctgtttatgatcgcaccagacgctatggctgctgtttttgcgcaggcggcgattaagcaccattatcggctgactgtgcgcgtcaatgatgtcatcgatctcatccacgcttaaaaaacgcgggtaaatcatgatcgcgtcgcagcgcagatccagcagatactgaatcgcctggcgctcttcttctgcgctgtgtttaccatctgccaatagcaactgccgccctttctcttccgccattcgcgcggcatgaaagagtaattcactaaaataaatgccgtggtaaagcgtgttggtcactaccagccccagcgtctgagtactcttcgcgctcagattgcgcgccagcaagtttggacggtaaccgctctcttctaccgcctgaaacacgcgatctttagtctcctggctgacgtagccattaccactaagcacgcgggaaacggtcgctttactaaccccggcgcgcttcgccacttccagcatcgtcgtcatcattttcatccctttacacgcaatcaacgcagtgtactgcaccgtttgccgattgtccttgcacaatcggcgggaaaaatattcaggtgaccggtttcacaaatataaaaaatgaacaattcactctcttgcttatttagtgacaactattcatgattttgtgaaaccggtttcttaattccgtttcagcatcggcatttttccgtcacgtcgactgataacaactacatctaccctactgataacaggataaaatccgatggccaaaaattatgcggcgctggcacgcagcgtgatagcggcactgggcggcgttgataacatcagcgcggtcacgcactgtatgacgcggttgcgctttgttatcaaagatgatgcacttatcgacagcccgacgttaaaaaccatccccggcgtgctcggcgtggtacgtagtgacaaccagtgtcaggtgattatcggcaataccgttagtcaagcctttcaggaagtcgtcagcctgctgccgggagatatgcagcccgcacagcccgtgggtaaacccaaactcacgctacgtcgcattggtgcggggatcctcgatgcgctgatcggcaccatgagtccgctgatcccggcgattatcggcggaagcatggtcaaactgctggcaatgatcctcgagatgagcggcgtgctgacaaaaggaagcccgaccttaaccattctgaatgtgattggtgacggtgctttcttcttcctgccgctgatggtcgcggcatctgccgccatcaaatttaaaaccaatatgagcctggcgattgccatcgcgggtgtgctggtacatccgagttttattgaactgatggcgaaagcggcccagggtgaacatgtcgaatttgccctgattccggtcaccgcggtgaaatacacctacacggtgatcccggcgctggtgatgacctggtgcctgagttatatcgaacgctgggtggacagcattacaccggcggtgaccaaaaacttcctcaaaccaatgctgattgtgttgattgccgcaccgctggcaatcctgctgattggcccgattggtatctggatcggtagcgccattagcgcgctggtttacaccattcatggttatctgggctggcttagtgtcgccattatgggcgcgctgtggcctctgctggtaatgaccgggatgcaccgcgtctttacgccaaccatcattcagaccattgccgaaaccggcaaagaagggatggtcatgccgagtgagatcggcgctaacctgagcctgggcggtagtagtctggcagtggcgtggaaaacgaaaaacccggaactgcgtcagacggcgctggctgcggcggcaagtgccattatggcggggatttccgaaccggcgttatatggcgtggcgatccgcctgaaacgtccgcttatcgccagtcttatcagcggttttatttgcggcgcggttgccggtatggcggggcttgccagccacagtatggcagcgccggggctatttaccagcgtgcagttcttcgatccggcgaatccaatgagcatcgtctgggtgttcgcggtcatggcgctggcggtggtgctgagctttatcctcacactgttgctcggctttgaggatattcctgttgaggaagcggctgcccaggcgcgaaagtatcagagcgtacaaccgaccgtcgccaaagaagtaagtcttaattgaggatgaaaatgagtgtatttccagaaagttttttatggggcggcgcgcttgccgccaaccagtctgaaggtgcgttccgtgaaggtgacaaaggtctgaccactgtcgatatgatcccacacggcgagcatcgaatggcggtgaaactggggctggaaaaacgttttcagttgcgagatgacgagttttatcccagccatgaggcgacggatttttatcatcgttataaagaagatatcgccctgatggcagagatgggattcaaggttttccgtaccagtattgcctggagccgtctctttccgcagggcgatgaaatcacgcccaatcagcagggcattgctttttatcgttctgtctttgaagagtgtaaaaagtacggtatcgaaccgctggtcacgttgtgccacttcgatgtgccgatgcatctggtcaccgaatatggctcctggcgtaaccgcaagctggtggagtttttcagccgctacgccagaacctgctttgaagcatttgatggtctggtgaaatactggctaaccttcaatgaaatcaacattatgttgcatagcccgttctccggcgcgggtctggtgtttgaagaaggtgaaaatcaggatcaggtgaaatatcaggccgcgcatcaccagctggttgccagtgcgctagccaccaaaatcgcccatgaggttaacccgcaaaatcaggtgggctgtatgctggcgggcggtaacttctacccttacagttgcaagccggaagatgtctgggcggcgctggagaaagaccgggaaaacctgttttttatcgatgtgcaggcgcggggcacgtatccggcttactctgcccgcgtattccgcgaaaaaggggtaaccatcaacaaagcaccgggcgatgatgaaatcctgaaaaacaccgtcgattttgtctctttcagctattacgccagccgctgcgccagcgcggagatgaacgccaacaacagcagtgcggcgaacgtggtgaaaagcctgcgtaatccgtatctacaggtgagcgactggggctggggaattgatccactcggtctgcgtatcaccatgaatatgatgtacgatcgttatcagaagccgctgtttctggtggaaaacggcctgggcgcaaaagatgaatttgctgccaatggcgagattaacgacgactatcgcatcagctacttacgcgaacatatccgcgcaatgggcgaagcgattgcagacggcattccgctgatgggctacaccacatggggctgtattgatttagtttccgcctctacgggtgaaatgagcaaacgctacggctttgtctttgttgaccgtgacgacgcaggcaacggtacgctgacgcgcacgcgtaagaaaagtttctggtggtataaaaaagtgattgccagtaatggggaagatttagagtaagtaacagtgccggatgcggcgtgaacgccttatccggcctacatgtcgcacgaaccatgaaggcccgataagcgcagcgcatcgggcaatttagcatttggcatcagagctggttcaccccatcaagaacatccctgtcctgattccttaatgaaaaattactcttcttccaccgctaactgcgcgaagccgccatttccttcccagccttccagtcgttgataaacggtttctaccgcatctttaatcggctgggtcatcgggtagtaaaagccgacgatatccggctgaatgccgaggaaaatcacttcgccaatatcttctttcaactggtcgataaggtaattcaacggcatgttatgggtagtcatcataaacatctcggcgatatcatccgggtcgatgatgcggatctcgccggggtttagccccatatccgtggcgtcgacaatcagcagtcgtgtcgggcgcagttcacggatagcgacgatgtcgttttccggtgcgctaccgccgtcaatcaccacccagttacctttcggcgcggcggcgcacttttccgccagcagcggacctgcgccatcatcgcccatcatgctattgccaacacagagtaaaacgtcagtcacgcagtctcctcaccatcaaatagatggcgttttcctgatgaatatcatgcagcatacttaacagcattgtactccattcctgctgctggctagtttgcgctgcccgggctttatcgaatgcgttggccagcatcggcacatggttaatgtcgatgacgatctcaccatatttcggcacgccttccattttgcggcgggcttcactgcctgcctccagagtggcaatccatgccagatattcatcccacgggcaggtgagcgccgcttccaggcaatcgataaccccaaggtggtgaccaatcgccaggctgtaatagaccacctgctgcgcctcggcgggcgtggcatcgttctcatcaataaatttatggctcagttgactgaacaccaccttttcactcatcggatacgcgcctcttcaacaacatgattcagatggctgacaatctcgttcagacgcggatcgttttccgcttccagccagcgtgcaacctgttcttcgccctgccctaactgtgtaaggtaatcatcggcaatctgacgaccgtaacgataacccgccaggcgacgtgcttcgcgatccactttcacgcgcagcggctgcaccatatcaccatgcaggatctccgccggttgttcatccagttcacccggcccacgggcgtgaattttctgctccagcaggccgagcgccattgcaaagccgtacagcgtggcggcaggcgttggcgggcagccagggatataaacatccacagggacaattttatccgtaccgccccacacgcagtagagatcgtggaagatcccgccactgttaccgcaggcaccgtaggagatacaaattttcgggtccggcgcggactgccacgcacgcagcgcaggggatcgcattgcacgggtgaccgcgccggtaaacagtaaaatatccgcatgacgcggactaggaacgactttaatgccgaagcgttctgcatcaaacagcgggctaagcgtggcgaaaatttcgatttcgcaaccgttgcagccgccgcagtccacgcggtaaacataggcagaacgtttgatttttttcagtaagctcgccttcatgctggcgatggattcatccaccgtcatggggaccggaatgccgttggcgtcacgggggcctaataaattgctcatcagatggcctctttcatatggcgagtcagttcaatacggtcggacggcaccaggcatttctggcgcttacattccgggcaagtctcaaagctttcgcggtggttttccgcgcggctgtcgccgttgtgcttaagcagcgcaatggcgtagtcgatctctttctggacggcgaaaggacgattgcagacgcggcagttgcacagcgcgaagcgggactgttgcaggaagtcttctttcttccacaccgccagttcgtactcttggctcagtttgatcgccgccgtcgggcagacttcttcgcagcgtccacagaagatgcagtgcccaagattaaactcccaggcaagctctcctgtggcgaggtcagtttcaaccgttaaggcgttactcgggcaggcattgacgcaggccgcgcagccgatgcactgctgcgggttctgctctggcttaccacggaagtttttatcaaccgcaatcggctccagcggataagagctggtcgccgtgccggttttgatgacttttttgataaaggtaaacatggcgattccttatttcagcgggctgtttttacgctcaatgctgtaacgctcgagttctttgtacggcaccactttgctcttcttcttacgcacatcgaccacggtcatgcggtcggtacaggagtagcaagggtcgaggctaccgataatcagcggcgcatcggaaacggtgttgccgcgcagcatgtagcgcagggtcggccagttcgcgtaggtcgcggcacggcagcgccagcggtacagcttctggttgtcgccggtcatgctccagtggatatcatcgccgcgcggcgcttcggcaaagcccagcgcaaagcggtgcggaatgtaggtaaagccttccaccatcagtgggccacccggcaggttatccagaccgtagtcgatcatgttcagcgcggtatagacttcgttgatacgcactttcagacgggaaataacgtcgcagccctgctcgctgtggacttccattggcagcaggccatagccgacaaacgggtgatcggcgcgggtatcacgggcgtgaccgctggcacggaccatcgggccgacgttactgaagtcgcgagcgatttccgggtccagacgaccaatgccgacagtgcgctgttccatgttcggagtgctcagcagcacatccaccagctcctgcacttcacgacgcatctgttgtgccagctggcgggtctggatcatgtcgtctttcagcagatcgcgacgaatcccgccgatcaagttcaggccgtaggttttacgcgcaccggtaaggatctctgccattttcatggaggtttcacgcacgcggaagaactgcataaagccggagtcgaagccggtaaagtgacaggccaggccaaggttgagcagatggctgtgcaagcgttctacctccagcagaatggcgcggatcatctgcgcacgttctggcacctgaatacccatcgcgttttccacgctcgtggtgtaggcggtgctgtgggcaaagccgcagatcccgcacacacggtcagagaggaaggtcacttcgttataacccatacgggtttccgccagtttttccatgccgcgatggacgtagaacagacggtagtcggcgtcgataatgttttcgccatcgacgaacagacggaagtggcccggttcatcagaagtgacgtgcagcggaccaatcggcacgacgttgtttttcttgtcgcccagttcgttgatgaactcgtaggtttcagcatcggtggtcggtgccggacgctgacgataatccatgctgtctttacgcagcggataaagttcatccggccagtcatccggcagcaccagacgacgttcatccggcagaccaaccggaatcaaaccgtacatatcgcgcacttcacgctcgccccacaccgccgccggaacgcgcggcgtcacggacggatattccggtttgttggcgtcaacttcgacgcgaaccgtaatccaacacttagtgcccttctccatgctcagcacgtagtaaacggcgtaatgaccattcagtttgcgttcgtcgttaccaaacagcacgctcagccagccaccctgtttgtagtaaagaaactccaccacttccggcaggtagttcacctttacggtgacagtcagctgatctttggtctgccaggcgtggtccagcacgacgcccggaaatgcctcattcagcgcggcgagataatgttgacctaatttttcttcagacatgctcaaactctctttaatcacgccgccagcaaggagacgaacgctaaaaatgcaaagccaaacccagcccaggtaatgcgcggagtaatatcaagacgcagacgggccatgctgttttcgaacagcgcgataaccaggacgccgaccaccagttttacgatggcaatcaccagcgccagcagcagtccaccggcggtgaaggtttccatttgtccccacggaataaacaccccgacgaacatctgcaacaccaccagctgtttcaggctgataccccatttcatgacgccaaagccgctgccgctgtattcagagagcgggccttcctgcagctcctgctcggcttccgccaggtcgaacggcagtttgcccatttcgataaaggtggcgaacgcacaggcacaaagcgccagtaccagcgggatgctctggctcagcggccagtgataaacggtgtcggtgatgttgctgatgttggtggaaccggcaacctgtgcggcaacccacagaccaagcagcagcatcggttcgaccagcacgccaagcatcgcttcacggctcgcgccgatagcggtaaacgggctaccggtatccagaccagaaatggcaaagaagaaacgcgcgatggcaaagagatacagtaaggtgatcaaatcacccagttgcggcagcggagaaccgacggtcaccaccggcagcgcagtagcgatagtcagcatgacgcccaccatcacatacggcgtcaggcggaacacccagccggaggcatccgggccgacgctctgacgccccagcagtttgataatgtcgcgatactcctgcaacacgcccggcccgcgacggttatgcaagcgggcgcgcgccacgcgggttataccggagagcagcggcgcaacggcaaataacaccagcgcctgaattaacggatataaaacactcattctcaggctcctcgactaacaataatcaccaccagtaccgccagttcaaccagcgccatccggcggaacagcaacgcactcccctcgcactgccagcccggcaccagagacaccggattcagccatttgcgtagtttcagcaccggcgcaaacgcctgtttcaccggcatggcaaaaccgtgagcggtaatcaccatacttttttcgtggtcgtaaccgcacacccaggccgcaccgcgggaacggcttggcaaacgatcgcctttgcaaatcgccataatgatgaatggcagcagcgggcaggcaatcagcagcaacgtgatcatcggttgagaaacggtggtgttagcaggctccagcggcagaggtacagcagcagagagcatcggcagtagccacggcgcagcaacaccgccaattacgcagcaaatcgccagtgccactacgcttacgctcatcaggagcggcgcacaggtggcgttttcggcttctttggtgcgcggcgcgccgaggaacgtgacgccatagactttcgccatacacatcaccgccagcgcaccggtaattgccagccccacagcgagcagcggccccagcagacgggcaacaaacgcgccactattgctcagtttgaaaaaactttgatagataacccattccccggcaaaaccattcagcggcggcagcgcagccattgccatcagcccgactaacatggcgatggagataaccggcattttcttgccaataccaccgagtttttcgatatcgcgatgaccggtacggaaccagacgctccccgccccgaggaacagtacgcttttgaacaggctatggttaagcagatggtacagaccaccgaccaggccaagagcaatcagcgccggttgttcgagcgcgatacccgttacgccagcgcccagccccagcaggatgatgccgatattttccagggtgtggtaagccagcaggcgctggatgttgtgctccaccagcgcatacagaccaccgacaaacgcggtgatcatgccgagcaccagcagcgcgatcccccaccacagcggtgcattaccgcccagcagactcagggttaaaatgcccagcaggccaattttcatgactaccgtagaaaacaacgcggcagctggcgcagaggcgttcgcatgtgcctgcggcacccagccgtgcagcggaataatcccggccagcaggccaaagccaatcactccgagcagccagatatcggaaccgagcggcagctgttgcatacgcatatccagcaggcgcagatccagcgtgccgtaacgctgccacagcagccagcaagcaatcgccagcagcagagtgccaagacgccccagcgcaaaccacagtttgccctctttgctgttgctggtgaggaacaccgcgcacagggccatgatttcggccattaccacgaacatgccgaggttgctggcaatgacggcgcagacggcggcagccatcaacatattgatctgcaagccgttgcacttcacctgcgcgtggcgatgccagtcaatgttgtagaggctgacaaacagaccgcacagaccgagcgtaatcagccaaatcgcgttaagcggagagatttgcacatcgtagcttaccaggctcagcgcaccgctcacgccaaccgcgccagtcagtacagtgaagcccgcggctgccgtatacagactaccaaccgcgccgccaattccagctatccagccacttaacgctttttgaaaagaaaagagaaatgccagaacagcggcggcgacaaaccacgccacgccgctattgatcagggaaattgcgctcatttagcctctccactttgagcctgctgaaacaaggtgagatcgccaaagtccgtgttaaaggtcagctcacgcttacgtttgctgacgcgggcgatatcggtgttatccaccagatgcagggctttagtcgggcacatccgcacgcaggccggaccttgttcatcaaagctacaaaggtcacatttgacggcgatcgcgcgaatacctggcacccagtcaagcaatgtgctgacacgcgccggagcaggcggtgccggtggcgctttcggggtattggcgtttgccggaatatccagcggacggctgccggaaaattcaattgcgccaaacgggcaggcgatgccgcacagcttgcagcttacgcacaggctttcattcaactgcacggccccatcgacgcgggtgatggcgttaaccgggcagaccaccgcgcagggtgcatcttcacagtggtgacagagctgcggcgcagattctttttcattcagcatcactctcaggcgcggcatactttgcaggccgtgctggcgatgcgtctcactacaggcggcctcacaagtgtggcagccgatacagagcgtggagtcagcaattacaaaacgattcaccaggcattcctcaggtgattgtcatttttgacgaaaacatgccgatgaaatgtcattttcgacactcatcgacacgcccatccccaaacaggcgtaacgcctgcaaaacgggcaaagcctcagctcatgctgccgggctttgtccctttaccagttggcttaaattcaccggcacattgttttcaatagcggtgtataagctgtcgtaaacgccagcgattttttcgagatagtgttccagaacctgttcgcgatcgcggatgttgaccttgccatcaatcatgccgtcaatgctcagttgcgcctgcgcaatccgctgtttgtcttcgccatcttttgtttcgacgtaatactcgatggtgtggctgttaaagccatccgccagggtgacgtaaatgcgaaaatgttcaaaaaggacgaaacagagttctttgtccggcgcgcagctcatggcgtgatgcaggcgcgctttgcttaacgtgatcccctgaaccaggctattgcagtagatgtgccactggtcctgtaggcgacgatgccgctgtgcgatgtaatcggctttctcgcttatttcccaaatagtcattgtcaggttacccgtttaacagagatgccagctttaagcattttttgtgccaacttttaatttattgttattaaagagatttttaagctaaagatgaatttcgtcgccgtgtcgacgtgtcatttcgacatcatcgacattattcaccgcagggataatcaacactggcacaattattgcttgtagctggcaatagttaatgggaggcgatatgcacgaaataaccctctgccaacgggcactggaattgatcgaacagcaggccgcaaaacacggcgcaaaacgcgtaactggggtctggctcaaaattggcgcattttcttgtgtcgaaaccagctctcttgccttttgttttgatctggtttgccgcggcagcgtggcggaaggttgtaaactgcacctcgaagaacaagaggccgaatgctggtgtgaaacatgccaacagtatgtgacgctactgacccagcgcgtccgccgctgtccacagtgtcatggtgacatgctgcagattgtggcagacgacggtttacagattcggcggatagaaatagaccaggagtgagcgatgtgtacaacatgcggttgcggtgaaggcaacctgtatatcgagggtgatgaacataaccctcattccgcgtttcgtagcgcgccatttgccccggcggcacgcccgaagatgaaaatcaccggcattaaagcgcctgaatttacccccagccagactgaagaaggcgacctgcattacggtcatggcgaagcgggcactcacgcaccgggcatgagccagcgtcggatgctggaagtcgaaattgacgtgctggacaaaaataaccgtctggctgaacgcaaccgcgcgcgctttgctgcccgcaagcaactggtgctcaacctggtttccagccctggttccggtaaaaccaccctgctgacggaaaccctaatgcgcctgaaagacagcgttccgtgcgcagttattgaaggcgaccagcaaaccgtgaacgatgccgcacgcattcgcgctaccggcacaccagcgattcaggtgaacaccggtaaaggctgccatcttgacgcacagatgattgccgacgccgcaccgcgtctgccactggacgataacggtattctgtttatcgaaaacgttggcaacctcgtatgcccggccagcttcgatctcggtgaaaaacacaaagtggcggtgctttccgttaccgaaggtgaagacaaaccactgaaatatccgcatatgtttgccgccgccagcctgatgctgctcaacaaagttgacctgttgccgtatctcaactttgacgttgaaaagtgcatcgcctgcgcccgcgaagtcaatccagaaattgaaatcatccttatttccgccaccagcggcgaagggatggaccagtggctgaactggctggagacacagcgatgtgcataaggtaaaactggctggagacacagcgatgtgcataggcgttcccggccagatccgcaccattgacggcaaccaggcgaaagtcgacgtctgcggcattcagcgcgatgtcgatttaacgttagtcggcagctgcgatgaaaacggtcagccgcgcgtgggccagtgggtactggtacacgttggctttgccatgagcgtaattaatgaagccgaagcacgcgacactctcgacgccttacaaaacatgtttgacgttgagccggatgtcggcgcgctgttgtatggcgaggaaaaataatgcgttttgttgatgaatatcgcgcgccggaacaggtgatgcagttaattgagcatctgcgcgaacgtgctagtcatctctcttacaccgccgaacgccctctgcggattatggaagtgtgtggcggtcatacccacgctatctttaaattcggcctcgaccagttactgccggaaaacgttgagtttatccacggtccggggtgcccggtgtgcgtactgccgatgggtagaatcgacacctgcgtggagattgccagccatccggaagtcatcttctgtacctttggcgacgccatgcgcgtgccggggaaacagggaagcctgttgcaggcaaaagcacgcggtgccgatgtgcgcatcgtttacagcccgatggatgcgttgaaactggcgcaggagaatccaacccgcaaagtggtgttcttcggcttaggttttgaaaccactatgccgaccaccgctatcactctgcaacaggcgaaagcgcgtgatgtgcagaatttttacttcttctgccagcacattacgcttatcccgacgttgcgcagtttgctggaacagccggataacggtatcgatgcgttcctcgcgccgggtcacgtcagtatggttatcggcaccgacgcctataattttatcgccagcgattttcatcgtccgctggtggttgctggattcgaaccccttgatctactacaaggcgtggtcatgctggtgcagcagaaaatagcggcccacagcaaggtagagaatcagtatcgtcgagtggtaccggatgccggtaacctgctggcgcaacaggcgattgccgatgtgttctgtgtcaacggcgacagcgaatggcgcggcttaggcgtgattgaatcttctggcgtgcacctgacgccggattatcaacgattcgatgccgaagcacatttccgcccggcaccgcagcaggtctgcgatgacccgcgcgcgcgttgtggtgaggtattaacgggcaaatgtaagccgcatcaatgcccgctgtttggtaacacctgtaatcctcaaaccgcgtttggtgcgctgatggtttcctccgaaggagcgtgcgccgcgtggtatcagtatcgtcagcaggagagtgaagcgtgaataatatccaactcgcccacggtagcggcggccaggcgatgcagcaattaatcaacagcctgtttatggaagcctttgccaacccgtggctggcagagcaggaagatcaggcacgtcttgatctggcgcagctggtagcggaaggcgaccgtctggcgttctccaccgacagttacgttattgacccgctgttcttccctggcggtaatatcggcaagctggcgatttgcggcacagccaatgacgttgcggtcagtggcgctattccgcgctatctctcctgtggctttatcctcgaagaaggattgccgatggagacactgaaagccgtagtgaccagcatggcagaaaccgcccgcgcggcaggcattgccatcgttactggcgatactaaagtggtgcagcgcggcgcggtagataaactgtttatcaacaccgctggcatgggcgcaattccggcgaatattcactggggcgcacagacgctaaccgcaggcgatgtattgctggtgagcggtacactcggcgaccacggggcgactatccttaacctgcgtgagcagctggggctggatggcgaactggtcagcgactgcgcggtgctgacgccgcttattcagacgctgcgtgacattcccggcgtgaaagcgctgcgtgatgccacccgtggtggtgtaaacgcggtggttcatgagttcgcggcagcctgcggttgtggtattgaacttagtgaagcggcactgcctgttaaacctgccgtgcgtggcgtttgcgaattgctgggactggacgccctgaactttgccaacgaaggcaaactagtaatagctgttgaacgcaacgcggcagagcaagtgctggcagcgttacattcccatccactggggaaagacgcggcgctgattggtgaagtggtggaacgtaaaggtgttcgtcttgccggtctgtatggcgtgaaacgaaccctcgatttaccacacgccgaaccgcttccgcgtatatgctaataaaattctaaatctcctatagttagtcaatgaccttttgcaccgctttgcggtgctttcctggaagaacaaaatgagttatacaccgatgagtgatctcggacaacaagggttgttcgacatcactcggacactattgcagcagcccgatctggccagcctgtgtgaggctcttagccaactggtaaagcgttctgcgctcgccgacaacgcggctattgtgttgtggcaagcgcagactcaacgtgcgtcttattacgcgagccgtgaaaaagacacccccattaaatatgaagacgaaactgttctggcacacggtccggtacgcagcattttgagccgccctgatacgctgcattgcagttacgaagaattttgtgaaacctggccgcagctggacgcaggtgggctatacccaaaatttggtcactattgcctgatgccactggcggcggaagggcatatttttggtggctgtgaatttattcgttatgacgatcgcccctggagcgaaaaagagttcaatcgtctgcaaacatttacgcagatcgtttctgtcgtcaccgaacaaatccagagccgcgtcgttaacaatgtcgactatgagttgttatgccgggaacgcgataacttccgcatcctggtcgccatcaccaacgcggtgctttcccgcctggatatggacgaactggtcagcgaagtcgccaaagaaatccattactatttcgacattgacgatatcagtatcgtcttacgcagccaccgtaaaaacaaactcaacatctactccactcactatcttgataaacagcatcccgcccacgaacagagcgaagtcgatgaagccggaaccctcaccgaacgcgtgttcaaaagtaaagagatgctgctgatcaatctccacgagcgggacgatttagccccctatgaacgcatgttgttcgacacctggggcaaccagattcaaaccttgtgcctgttaccgctgatgtctggcgacaccatgctgggcgtgctgaaactggcgcaatgcgaagagaaagtgtttaccactaccaatctgaatttactgcgccagattgccgaacgtgtggcaatcgctgtcgataacgccctcgcctatcaggaaatccatcgtctgaaagaacggctggttgatgaaaacctcgccctgaccgagcagctcaacaatgttgatagtgaatttggcgagattattggccgcagcgaagccatgtacagcgtgcttaaacaagttgaaatggtggcgcaaagtgacagtaccgtgctgatcctcggtgaaactggcacgggtaaagagctgattgcccgtgcgatccataatctcagtgggcgtaataatcgccgcatggtcaaaatgaactgcgcggcgatgcctgccggattgctggaaagcgatctgtttggtcatgagcgtggggcttttaccggtgccagcgcccagcgtatcggtcgttttgaactggcggataaaagctccctgttcctcgacgaagtgggcgatatgccactggagttacagccgaagttgctgcgtgtattgcaggaacaggagtttgaacgtctcggcagcaacaaaatcattcagacggacgtgcgtctaatcgccgcgactaaccgcgatctgaaaaaaatggtcgccgaccgtgagttccgtagcgatctctattaccgcctgaacgtattcccgattcacctgccgccactacgcgagcgtccggaagatattccgctgctggcgaaagcctttaccttcaaaattgcccgtcgtctggggcgcaatatcgacagcattcctgccgagacgctgcgcaccttgagcaacatggagtggccgggtaacgtacgcgaactggaaaacgtcattgagcgcgcggtattgctaacacgcggtaacgtgctgcagctgagtttgccagatattgttttaccggaacctgaaacgccgcctgccgcaacggttgtcgccctggagggcgaagatgaatatcagttgattgtgcgcgtgctgaaagaaaccaacggcgtggttgccgggcctaaaggcgctgcgcaacgtctggggctgaaacgcacgaccctgctgagtcggatgaagcggctgggaattgataaaagcgcattgatttaactgcaaattgccggacagatctgcctgtccggcatattattcatgaggttttttcggacgatatttttccggcagttctggcaccggacgcttgtcatcgatgagatgacgcacggttaagatcggatgacgccacagcattctcggcccggcccaacgcataatctgtttcatctcttcacgctttgcaggctggtaacagtgcaccggacactgcttacaggctggtttctcttcgccgaacacacatttatccagccgcttttgcgcgtaaacaaacaacgcctcgtaatgctccggctccgcactcgcctgcgggcatttcgcttgataaagatcgatcatttttttaatcgtcagtttttcacgagagatacgcttgccggacatgctgcctccacctcattaagatgtatttatattacatcttaatcttaaagggcactatgactccaaagaagaagggttagccaaccgatacaattttgcgtacttgcttcataagcatcacgcaaaagctgcaaaacagcatctttcccggaaccagcatcaagaactcgccgttcgcttcttcccctgaaatgattaactccggtatcatgtgcgccttatgtgattacaacgaaaataaaaaccatcacaccccatttaatatcagggaaccggacataaccccatgagtgcaatagaaaatttcgacgcccatacgcccatgatgcagcagtatctcaggctgaaagcccagcatcccgagatcctgctgttttaccggatgggtgatttttatgaactgttttatgacgacgcaaaacgcgcgagccaactgctggatattagtctgaccaaacgcggtgctagcgcgggagagccgatcccgatggcggggattccctaccatgcggtggaaaactatctcgccaaactggtgaatcagggagagtccgttgccatctgcgaacaaattggcgatccggcgaccagcaaaggtccggttgagcgcaaagttgtgcgtatcgttacgccaggcaccatcagcgatgaagccctgttgcaggagcgtcaggacaacctgctggcggctatctggcaggacagcaaaggtttcggctacgcgacgctggatatcagttccgggcgttttcgcctgagcgaaccggctgaccgcgaaacgatggcggcagaactgcaacgcactaatcctgcggaactgctgtatgcagaagattttgctgaaatgagcttaattgaaggccgtcgcggcctgcgccgtcgcccgctgtgggagtttgaaatcgacaccgcgcgccagcagttgaatctgcaatttgggacccgcgatctggtcggttttggcgtcgagaacgcgccgcgcggactttgtgctgccggttgtctgttgcagtatgcgaaagatacccaacgtacgactctgccgcatattcgttccatcaccatggaacgtgagcaggacagcatcattatggatgccgcgacgcgtcgtaatctggaaatcacccagaacctggcgggtggtgcggaaaatacgctggcttctgtgctcgactgcaccgtcacgccgatgggcagccgtatgctgaaacgctggctgcatatgccagtgcgcgatacccgcgtgttgcttgagcgccagcaaactattggcgcattgcaggatttcaccgccgggctacagccggtactgcgtcaggtcggcgacctggaacgtattctggcacgtctggctttacgaactgctcgcccacgcgatctggcccgtatgcgccacgctttccagcaactgccggagctgcgtgcgcagttagaaactgtcgatagtgcaccggtacaggcgctacgtgagaagatgggcgagtttgccgagctgcgcgatctgctggagcgagcaatcatcgacacaccgccggtgctggtacgcgacggtggtgttatcgcaagcggctataacgaagagctggatgagtggcgcgcgctggctgacggcgcgaccgattatctggagcgtctggaagtccgcgagcgtgaacgtaccggcctggacacgctgaaagttggctttaatgcggtgcacggctactacattcaaatcagccgtgggcaaagccatctggcacccatcaactacatgcgtcgccagacgctgaaaaacgccgagcgctacatcattccagagctaaaagagtacgaagataaagttctcaccagtaaaggcaaagcactggcactggaaaaacagctttatgaagagctgttcgacctgctgttgccgcatctggaagcgttgcaacagagcgcgagcgcgctggcggaactcgacgtgctggttaacctggcggaacgggcctataccctgaactacacctgcccgaccttcattgataaaccgggcattcgcattaccgaaggtcgccatccggtagttgaacaagtactgaatgagccatttatcgccaacccgctgaatctgagcccgcagcgccgcatgttgatcatcaccggtccgaacatgggcggtaaaagtacctatatgcgccagaccgcactgattgcgctgatggcctacatcggcagctatgtaccggcacaaaaagtcgagattggacctatcgatcgcatctttacccgcgtaggcgcggcagatgacctggcgtccgggcgcagtacctttatggtggagatgactgaaaccgccaatattttacataacgccaccgaatacagtctggtgttaatggatgagatcgggcgtggaacgtccacctacgatggtctgagcctggcgtgggcgtgcgaggaaaatctggcgaataagattaaggcattgacgttatttgctacccactatttcgagctgacccagttaccggagaaaatggaaggcgtcgctaacgtgcatctcgatgcactggagcacggcgacaccattgcctttatgcacagcgtgcaggatggcgcggcgagcaaaagctacggcctggcggttgcagctctggcaggcgtgccaaaagaggttattaagcgcgcacggcaaaagctgcgtgagctggaaagcattagcccgaacgccgccgctacgcaagtggatggtacgcaaatgtctttgctgagtgtaccagaagaaactagccctgcggtcgaagctctggaaaatcttgatccggatagtctcaccccgcgtcaggcgctggagtggatttatcgcttgaagagcctggtgtaataacaattcccgatagtcttttgctatcgggaatattaacgacaactgacgaataaaataaaaacaccctgtataataggaaagcttattttacagggtaaaaccatgccatctacacgctatcaaaaaatcaatgcccatcactatcgccatatatgggtcgttggtgatattcatggtgaatatcagttattacaatcccgcttacatcaactctcttttttccccaaaatcgacttacttatttctgtcggcgataatattgatcgtggaccggagagtcttgacgtcctgcgcctgctaaaccaaccctggtttacgagcgttaaaggcaaccacgaagcgatggcgcttgaggcattcgaaactggcgatggcaatatgtggcttgccagcggtggtgactggtttttcgatttaaatgatagtgagcaacaagaggcaatagatctgttgctgaaattccatcaccttccacatattattgaaatcactaacgacaacataaaatatgccatcgcacatgcagattatccggggagtgaatatctctttggtaaagaaatagcggagagcgaattactctggcctgttgatcgtgtgcagaaaagccttaatggcgagttacaacaaataaacggcgctgattattttatatttggacatatgatgtttgataacattcagacgttcgctaaccagatttatattgataccggaagcccgaacagcgggcggctgagtttttataaaataaagtaatctcatgcttcttctgtgaagcatgagtaacccggtgttattgcaggccattattcatttttcgctaccagcaaagagagatcctgcttcaccagcgcgcgactggcactctccggcaaaccgtcgtctgtaataatctgatcaaactcgcttaatggtaacgccagccatgtcgccacctgaccatatttcgtcgcatcacagaccaaaactcgctggcggctggcactggcaatcgcccgtttcaccgtgactttatcttccgctggcgtagaaatcccccgcacactccaactgcttgcagaaataaaagcctgatcaatcatcaggctgcgcagcatggtcgcagcggcttccccgacacaggaacggttttcccgacacactgcaccgccagtgtgaataattgtgcaattactgttgtcgagcaagtagtccgcaataacgaaatcgtttgtgaccacagtcagactctccatgtgaatcagatgctgtgctatcgctaacgtggtcgttcccgcatccagatagatacaacttcccggctgaacaagacttgccgccagcttgccaatagccgctttttgcgtcattgccagcgcagtttttacctgatgagaaggttcatgcgccacgcgtcccggagactggacgcctccggacaccagcacaacggctccctgctgctccagtttttgtaaatcccgacgaatggtcatatgactcacattcattctgtccgttagttcagcaatactgacaatgcctttttcagctaccatctcaaggatgatttggcgacgctctacgggtatcaacttttgctccttcctttgtcctgcactcattctacgctatttgcctgcgaaacgtgcgcggcgcaactaacgcttagttcacataaaataacacacaatgttaatttatgtgaatcagatcaccataccgttatcttccagcgcttatattcacaatatcaaacaaaatatcacttaaattaacaaggagagcagatgaaaacgggatctgagtttcatgtcggtatcgttggcttagggagtatgggaatgggagcagcactgagttatgtccgcgcaggtctttctacctggggcgcagacctgaacagcaatgcctgcgctacgttgaaagaggcaggtgcttgcggggtttctgataacgccgcgacgtttgccgaaaaactggacgcactgctggtgctggtggtcaatgcggcccaggttaaacaggtgctgtttggtgaaacaggcgttgcacaacatctgaaacccggtacggcagtaatggtttcttccactatcgctagtgctgatgcgcaagaaattgctaccgctctggctggattcgatctggaaatgctggatgcgccagtttctggtggtgcagtaaaagccgctaacggtgaaatgactgtcatggcctccggtagcgatattgcctttgaacgactggcacccgtgctggaagccgttgccggaaaagtttatcgcataggtgcagaaccgggactaggtagcaccgtaaaaattattcaccagttgttagcgggcgtacatattgctgccggagccgaagcgatggcacttgcagcccgtgcggggatcccgctggatgtgatgtatgacgtcgtgaccaatgccgccggaaattcctggatgttcgaaaaccggatgcgtcatgtggtggatggcgattacaccccgcatagtgccgtcgatatttttgttaaggatcttggtctggttgccgatacagccaaagccctgcacttcccgctgccattggccagtacagcattgaatatgttcaccagcgccagtaacgcgggttacgggaaagaagacgatagcgcagttatcaagattttctctggcatcactctaccgggagcgaaaagttgagctaaactctaccgggagcgaaatcatgatcaagattggcgttatcgccgatgattttaccggcgcgacggatatcgccagttttctggtggaaaacggtctaccaacggtacaaattaacggtgttccaacaggtaaaatgccggaagcaatcgacgcactggtgatcagcctgaaaacgcgctcctgtccagtggttgaagccacacagcaaagcctggcggctctgagctggttgcaacagcaaggttgcaaacagatctatttcaaatactgctctactttcgacagtacggcgaaaggtaatattggcccggttaccgatgccttaatggatgctctcgacacgccgtttacggtcttctctccggccctgccggtcaacggacgtacggtttatcaggggtatttgttcgtaatgaatcaactgctggccgaatccgggatgcgccatcacccggtaaatcccatgaccgacagctatcttccccgtctggttgaagcgcaatccacagggcgctgcggcgtcgttagcgcacatgttttcgaacaaggtgtggatgccgttcgtcaagagctggctcgcttacagcaagagggctaccgctacgcggtgcttgatgcgctgaccgaacaccatctggaaattcagggagaagccttgcgcgatgccccactggtaacgggcggttctggtctggcgattggcctggcccggcagtgggcgcaagaaaacggtaaccaggctcgcaaagcagggcgtccgctcgctgggcgcggcgtagtgctctccggtagttgctctcaaatgaccaaccgccaggtagcacattaccgtcaaattgcaccagcccgtgaagttgatgtggcacgctgcctcagtattgaaactctggccgcttatgcacacgaactggcagagtgggttctgggccaggaaagtgtacttgctccactggtttttgccaccgccagcactgacgcattggcagcaattcaacagcaatacggtgcacaaaaagccagtcaggcagtagaaacactgttttctcaactagcggcgcggttagcagcggaaggcgtgacacgctttattgtcgcaggcggtgagacctccggcgtagtcacacagagcctgggaataaaagggtttcatattggcccaaccatttccccggcgtgccgtgggtaaacgcactggataagcctgtctcactcgcccttaaatctggcaacttcggtgatgacgcctttttttcacgagcccaaagagagtttttatcatgagcgatttcgcaaaagtagagcagtctttgcgagaggagatgacgcggattgccagtagtttctttcagcgcggctatgcaaccggtagcgctggcaatctgagcctgcttttacctgacgggaatttactggcgacaccgacaggtagttgcctgggcaatctcgatccgcagcggctttccaaagtcgccgcggatggcgaatggttaagtggtgacaaacccagcaaagaggtgctctttcatctggcgctgtatcgcaacaatccgcgctgtaaagcggtggtgcatttgcacagcacatggagcacggcgctttcctgcctgcaagggctggacagcagcaacgttattcgtccgttcacaccatacgtggtgatgcggatgggaaatgtcccgctggtgccttattaccgaccgggcgataaacgcatcgcacaggatctggcggaactggcagcagacaatcaggcttttttactggcaaatcatggcccagtggtttgcggtgaaagcctgcaagaagccgccaacaatatggaagagctggaggaaacggcaaagctgatttttattctcggtgaccgcccgatccgttatctgaccgcaggtgaaattgcggaattaaggagttaatgcaatgcctcgttttgcagctaatttatccatgatgttcaccgaagtgccttttattgaacgcttcgccgcagcgcgaaaagccgggttcgatgctgtggaatttctgtttccctataactactccaccctgcaaatccaaaagcaactggagcaaaaccatctgacactggcgctgttcaataccgctcccggagatattaatgcgggggaatggggattatccgcccttcccggacgtgagcacgaagcacacgcagacatcgacctggcactggaatatgcattggcgctcaattgtgaacaagtccatgtgatggcaggcgtcgtgcccgctggcgaagatgctgaacggtaccgggcagtatttatcgataatatccgctacgctgccgaccgctttgcgccacacggcaagcgaatattagttgaagcactcagccccggcgttaagcctcattatctcttctccagccagtatcaggcactggctattgttgaagaggttgcgcgagataacgtgtttattcaactagatacttttcatgcgcaaaaagtagatggcaacctgacgcatttaatccgcgactacgccgggaaatatgcgcacgtacaaattgccggactacctgatcgacatgaaccggacgatggagaaatcaactatccgtggctgttccgcctgttcgatgaggtgggatatcagggctggatcggttgtgaatataaacctcgtggcctcaccgaagaagggcttggctggtttgacgcctggcgctaattcgttaaatccctaattacaacgtacccatacatccccccatctacggatggggtaggttaactataactttcagacagggtttcccatgtccacaattacattgttatgcattgcgttagctggcgtaatcatgctgttgctgctggtcatcaaggcaaaggtacaaccattcgttgctttgctcctcgtcagcctgttagtcgcacttgcggcaggtataccggcgggcgaagtgggtaaagtgatgatcgccgggatgggcggtgtgcttggttccgtcactattattattggtctgggcgctatgctggggcgtatgatcgaacactctggtggtgcagagagtctggctaattatttcagtcgcaagttaggtgacaaacgaactatcgctgcgctgactctggcagcgttcttcctcggtattcccgtcttctttgatgtcggctttattattcttgcgccaatcatttacggttttgccaaggttgccaaaataagcccactcaaatttggcctgcctgtcgctgggatcatgctcactgttcacgtggcggtaccgccgcatccaggccctgtcgccgcagcggggttactccacgcagacatcggctggctaaccatcatcggtattgcgatttctattcccgtaggggttgttggctactttgcagcgaaaataatcaataagcgccaatatgcgatgagtgtagaagtactggaacagatgcaactggctccggccagtgaggaaggcgcgacaaaattaagcgataaaataaatccaccgggcgtcgcgctggtcaccagcctaattgttattcctatcgcgattatcatggcgggtacggtttccgcaacactgatgccgcctagccatcccctgcttggtacgctacagctgatcggcagtccaatggtagctctaatgattgcgctggtgctggcattctggttattggctttacgtcgcggctggagcttacaacacaccagcgacattatgggcagtgcgcttcctactgcggcggtagtgattttggttactggtgctggaggggtatttggcaaagtgctggtggaaagcggcgtcggcaaagcccttgccaacatgctacaaatgattgacctgcctctgttaccagccgcatttattattagtctggcgctgcgtgcaagccaggggagtgcaaccgtagcaatactgacaaccggcgggttactcagtgaagcggtgatgggattgaatccgattcagtgcgtattggtgacgctggcagcctgctttggtgggcttggtgcgagtcatattaatgacagtgggttctggattgtgaccaaatatctggggttgagcgtagcagacggtctgaaaacctggacagtgttaacgaccattctcggttttaccggattcttaattacctggtgcgtatgggcggtaatttgaccttaataaaaaggtccgatgggcatcggaccttttattgtgcacagaaaaggccagcctcgcttgagactggcctttctgacagatgcttacttactcgcggaacagcgcttcgatattcagcccctgcgtttgcaggatttcgcgcaaacggcgcaggccttcaacctgaatctggcgaacacgttcacgggtgaggccaatttcacgacctacatcttccagtgttgccgcttcgtaccccagcaaaccgaatcgacgtgccagcacttcacgctgtttggcgttcagctcgaacagccatttgacgatgctctgcttcatatcgtcatcttgcgtggtatcttccggaccgttctctttttcatcggccaggatgtccagcaacgctttttcggaatcaccacccagcggggtgtctacgctggtaatgcgctcgttaagacgaagcatacggctgacgtcatcaactggcttatccagttgctctgcgatctcttccgcacttggttcatggtccagcttatgggacaactcacgtgcggttcgcaggtaaacgttcagctcctttacgatgtgaatcggcaaacgaatagtacgggtttggttcataatcgcccgttcaatcgtctggcgaatccaccaggttgcgtatgtactgaagcggaaaccacgttccgggtcaaacttctctaccgcgcggatcagccccaggttgccctcttcgataaggtccagcaacgccagaccacgattgccataacggcgggcaatttttaccaccagacgcaagttactctcgatcatccggcggcgagaggcgacatctccacgcagtgcgcgacgcgcaaaataaacttcttcttcggccgttaacagtggactataaccaatctcaccaaggtaaagctgagtcgcgtccaacacacgctgtgtggctccctggcttaacagttcctcttcggccaaatcgttatcactgggttcctgttctactaaggccttttcgtcaaaaacctcaactccgttctcatcaaattccgcatcttcatttaaatcatgaactttcagcgtattctgactcataaggtggctcctacccgtgatcccttgacggaacattcaagcaaaagcctggttccgccgatttatcgctgcggcaaataacgcagcgggtttacggatttccccttgtaacgaatttcaaaatgcaagcgtgtactactggttccggtgctacccatggtcgctattttttgccccgccttaacttcttgttgttcccggaccagcattgtgtcgttatgggcgtaggcactcaggtaatcatcattatgtttgatgataatcagattaccgtagccgcgcagcgcgttaccagcataaacaacgcggccatctgcggtcgcgataattgcctgtcctttgctgcctgcgatatcaatccccttgttgcccccctcagaagcgccaaaggtttcgatcactttgccctcagtcggccagcgccaggtggagataggcgtactggtacttgtactgctgacagtcggctcggttgtgcttgctgttggtaccgttacaggcgctgtgaccgtggtcgcagttggcttgttgttcggcaacattttgttagcactctgttcaccgctagactcagaatacgtaattgtcggttggctcgcaacagcaacggtggaattttgtgcaggcttgatcacaactccttgctctgctgcgtcggcctgggtaatggcatttccgccagtgattggcgtaccggaagcattacccacctgcaaggtctgaccaacgttcagcgcgtatggtgcctgaatattgttgcgctgagcaaggtcacggaaatcgttgccagtaatccaggcgatatagaaaagtgtgtcgccttttttcacggtataggtactgccgctataactgcctttcggaatgttcccatactgacggttatagacgatgcgtccgttttccatctgtaccggctgctgagctactggctgcactggctggatttgcggttgttgagtagcctgaatttgtggctgctgcaccggctgaatttgcggttgctgcgctgtagacgtcgtccccattttcggcggcggcgtaatcaacataccagaattagtatttgcaggcgcattgccattaacggagctgaccggtgccggtggattactagtgtcagaacagcctgccagccataggctaaccagactcaaagccgcaatgcggcgaacggtgaattttgggcttcccgcgctcatttatcccccaggaaaaattggttaataaccagtgacataattaccgtgcaaggcaccctactgaacactggaaaagatgttcacgatacgctgacctgcggcaaaataaccaggaaaaatccaggtatttcctcacgttttaagccagctcacccttcactaaagggacaaagcgcacggcctccacggtatcgataataaattcgcctccccgacgacgcacccgtttcaaatactggtgctcctcccctacgggtaagacgagaatcccgccttcgtccagctgcgtcattagcgcagttggaatttccggcggtgccgccgtaacaatgatagcgtcaaacggcgcacgtgcctgccaaccttgccatccatcgccatgacgggtactaacattatgtaaatcaagatttttcaggcggcgacgtgcctgccactgcaagcctttaatccgttcaacgctgcaaacatgctggacaagatgcgccaggattgccgtttgatatccgctaccggtgccaatttccagcacccggctctgcggcgtcagctcgagtaattcggtcattcgcgccaccatatatggctggctaattgtctgcccctgacctatcggcaaagcgatattgtcccaggctttttgttcaaacgcttcatcaacgaatttttcacgcggcacggcggcaagtgcattcagcacctgctcatcctgaataccttgcgcacgtaattgatccagaagtgcttgtacgcgtctgcttaccattgcgtgccaactcccacgctgtttaaccagtcactaaccacatcttgcgcgctatgcgcagttaaatccacatgcagcggcgtgatggagacatagccctcatctaccgcagcaaaatcggtccccggaccagcatcacatttaccgcccggcgggccaatccagtacagcgtattgccgcgcggatcttgctgcgggatcacctgatctgccggatgtcgtgtaccgcagcgcgtcacgcgaatacctttgatttgatccaagggtaaatccggaacgttaatattaagaatacgcccggtgcgcagcggctctttacacagtgcgcgcaaaatactacaggttaccgccgcggcagtgtcgtaatgtttatgcccgtcaaggctgacggcaagcgccggaaaacctaaatgacggccttccatcgcggcggctaccgtaccggaataaataacatcatcccccagattcggcccggcgttaattccggacacaacaatgtccgggcgcggacgcatcagagcattcacgccaagatagacgcaatcggtcggggttcccatttgcacagcaatatcaccattttcaaaggtaaacgtgcgcagggaggattccagtgtcagagaattactagcgccgctgcggttacgatcgggggcgaccacctgaacgtcagcaaactcacgcaaggctttcgccagcgtttgtataccgggtgcatgtaccccgtcatcattactcagcaatatgcgcataatcacctgttgtgttgataagttccctgacaacgctggttgcaaaactacccgccggaagccagaaacggatctctacggtgacgtcatcccaccaattccagcttaattgttgcggatacagcagcatcgctctgcgcgcggcttcaactttttcgcgcaccagtaaagcttgtaattcagtttctgcggcgacagctgcttgttcgaatgccagcgcttcacgctgagttccccattcgccactgcctggcaatgcggcggttatcatcaactctttatcgttgacgcgacgctgtaattccgccagttcttcggtggttgcgacaaaccagctaccacgtccggctaattgtagcgcatcgccgtcaacaacttgattaacgtctgcttttttgaggcgctcagcaacaatctgattaaacaacgcactgcgggctgcgctcaaccaaaaactccgtttattgcgatcgcgcaccggagtattggtttgcgcccagcgctgcgccccctgcaagttgctaccgccaatcccaaaacgttgggcaccgaagtagttcggtacaccttttacgcaaatatcgatcagacgttgttcaacgtcatcgcgattgctcacttcgcgcagaaccagggtaaaggcgttacctttcagcgcgcctaaacgcagcttgcgcttgtgccgcgcatactccagcacctggcagccttccagttgaaaggcgctcagatcgggcatttccttgcccggcacgcgagcgcataaccactgttccgtaacagcatgtttgtctttttgcccagcgaagctgacttcacgggcatgaattttcaggaatttcgccagtgcatccgccacaaaacgggtattgcagccgtttttgaggattctaaccagaatatgctcaccttcaccatcaggctcaaagcccaaatcttccaccaccacaaagtcttccggattggctttcagcagcccggtgccttgcggtttaccgtggaggtaagtgagattatcaaactcaatcattttgttgccttaatgagtagcgccaccgcttcacaggcaatcccttccccacgtccggtaaatcccagtttttccgtagtagtggctttcacgttaacatcatccatatggcagccgagatcttcggcaataaacacgcgcatttgtggaatgtgcggcaacatcttcggtgcctgagcgatgatagtgacatcgacgttgccaagggtataacccttcgcctgaatacgacgccaggcttcgcgtagcagctcgcggctatcggcacctttaaatgccggatcggtatccgggaacagcttgccgatatcccccagcgccgccgcgccaagcaatgcatcggtcaacgcatggagcgccacgtcgccatcagaatgcgccagcaatcctttttcgtaaggaatgcgtacgccaccaatgataattgggccttcaccgccaaaggcatgtacgtcaaaaccgtgtccaattcgcattatgtattctcctgatggatggttcgggtgaggtaaaactcggccagtgccaaatcttccgggcgcgtgactttaatgttatccgcacggccttcgaccaactgaggatggaatccgcaatattccagcgcgctggcttcgtcggtaatagtcgcgccttcatttagagcgcgcgtcagacagtcatgtaacagctcacgagggaaaaattgcggcgtcagcgcgtgccataagccgttgcgatcaacggtatgagcaatggcatttttgcccggttcggcacgtttcatagtatcgcgcactggtgcggcgaggatcccccccgtgcggctggtttcgctcaacgccaacaatcgcgcgaggtcatcctgatgcaaacaaggacgagcggcgtcatgcaccaatacccactgcgcgtcgccagcggctttcagacctgccagcacggaatcggcacgctcatcaccgccatctacaacggtgatttgcggatgattcgccagaggaagttgtgcaaaacggctatcgccaggacttatggcaatgacgacacgtttcacccggggatgcgccagcagcgcatgcacgctgtgttcaagaatggtttgattaccgatactgagatattgcttaggacattccgtttgcattcgacggccaaatccggccgccggaaccacggcgcaaacatccaaatgagtggttgccatgttaattcccgggctgatttatcgattgttttgccccgcagactgtgcgcgcttgctcgcgtcaggcaccagacgataaaaagtttcgcccggcctggtcatgctgagttcattacgcgcacgctcttcgagcgcctcctggccgccattgagatcgtcaatttcggcaaaaagttgatcgtttcgcgctttaagtttcgcgtttgtagcttgctgtgccgccacatcatcattgacgcgggtatagtcatgtataccgttcttaccgaaccacaggctatactgtagccagaccagaatagccagcaacagcagcgttagtttacccatcctgccccctgaaaaacggcatcatcatcccatgcatccgaagacgactctacatcctctgttggggataccgcgacaacgcgggcaaatgtaccacatttgtccattgttacgtatacccagggcgtgcagaacataatctcattattagttacggtttgaattatgaacagaggagacgggaaagtacaaattagcccagtagccacataaacagtgcgccaaacataatgcctactgtcaccagggtgaaaacaatactgtagcgtagctttccgtccatcaaactatgcagcgcaatccccaccactaccgcgacgggcatcagcgccagaaagaaaggccaggtgtagataaagaagaacagcgtgttagagccataaatcaacatcggcatcgccagcgcaaataaccaggagataaaaccgaccacggcaccaggcagactccatgtggtttcttcatcctcagtaaggctgtcgttatttgttagtgtaatgttatggctattacgcatatttgatcctgttactttgacgaaccgggcatggaaacccggtggtgtctcaggatctgataatatcgttctgtctcaacagatctaataattgctgtaccaaatttgttactaattgttcaccattgagatgaatttctgcgctttcaggcgcttcgtaaacggaatctattcccgtaaagttgcgcagttcaccggcacgcgctttcttatataagcctttgggatcgcgggcttcgcaaatcgccagcggcgtatcgacaaacacttcgataaagcgcccttctcctacgcgttcgcgaaccatctggcgttcggcgcggtgtgggctgataaatgcggtcagcaccaccagtccggcttcaaccatcaaattcgccacttcaccgacgcgacggatattctctttacgatcggcatcgctaaaaccgagatcgctgcataatccgtggcgaacattgtcgccatccagcagatacgtactgacgccgagtttatgtaacgcctcctccagcgccccggcgaccgtacttttaccggacccggagaggccggtaaaccacagcactacaccacgatgaccgtggtgtagctcgcgttgttgcacagtgaccggatggctatgccagacgacgttttcgtcatgcagcgccattatttatcccccagcaaatcgcgcgcgccccagtgcggaaagtggcgacgaaccagagcattcaattccagttcgaatgcactgaattcagatggcgcagcagttgcctggctaactggctcgtgcaccataccggcacccacggtcacattgctcaggcgatcgataaaaatcagcccacccgtcaccggattttgttgataacgatctaacaccagcggctcgtcaaaagtgagatccacgaggccgatcccattcagtggcaggttttcaacttcacgctgggtaaggttattaatatcaacctgatagcgaatgccatcaacacgcgcgcgcgtcttcttaccggcaattttgatgtcgtaactctgccctggagaaagcggctgttccgccatccataccacatccacgctcgcgctctgcaccgccggtaacgcttcgtctgccgccagcagcagatcgccacggctgatgtcgatctcatccgtcagcaccagggtgatcgcttctccggcaaaggcttcttcgcgatcaccatcaaaagtcacgatccgcgcgacgttactttccacaccagagggcagcactttgacacgttgcccgacttccacgcgaccggatgccagcgttccggcgtaaccacgaaaatcgagattcgggcgattaacgtactgcaccgggaagcgcattggctgagcatccaccactcgctggatctccacggtttccagcacttcgagcagtgtcggaccgctgtaccacggcatactttcactttggcttgccacgttgtcgccttccagtgcagagagcggcacaaagcggatatccagattacccggcagctgcccggcaaaggtcaaataatcttcacgaatacgggtgaacgtctcttcactgtaatccaccagatccattttgttgatcgccacgaccagatgtttgatccccaacagtgtggagataaaactgtgacgacgggtttgatcgagcacgcctttacgggcatcgatcagtaagatcgccagttcacatgtgcttgcgccagtcgccatattgcgggtgtactgctcgtgccctggggtgtcggcgataataaatttacgcttctcggtagagaaatagcggtaggccacgtcaatggtgatgccctgttcgcgctcagcttgcaggccgtccaccagcagagccagatccagcttttcgccctgggtgccgtgacgcttactgtcgttatgcaggctactgagctgatcttcgtagatttggcgggtatcgtgcagcagacgaccaatcagagtacttttgccgtcatcgacgctaccacaggtcagaaaacgcagcaggcttttatgttgttgcgcaatcatccaggcttcgacgccgccttcattggcgatttgttgtgcaagtgcggtgttcatcttaaaaatacccctgacgttttttcagctccatagaccccgcctggtcgcggtcaatcacgcggccctgacgttcactggtggtggaaaccagcatctcttcgatgatttccggcagtgtttgtgcattactctccaccgcaccggtcagcggccagcagcccagcgtacggaaacgcaccatccgttttttaatcacttcgcccggttgcaggtcgatacggttgtcatcaatcatcatcaacataccgtcgcgttccagaaccggacgttccgcagcgagatatagcggaacaatgtcgatattttccagccagatgtattgccagatatcctgctcggtccagttagagagcgggaagacgcggatgctttcgcctttgttaatttgcccgttgtagttgtgccacagctccgggcgctgatttttcggatcccagcgatggaagcggtcacggaaagagtaaattcgctctttagcgcgggatttctcttcgtcacggcgcgcaccaccgaaggcggcatcaaaaccgtatttgttcagcgcctgtttcaggccttcagttttcataatatcggtatgtttcgcgctgccgtgcacgaatggattaatccccatcgccacgccttccgggtttttatgcaccagcagttcgcagccgtaggctttagcagtacgatcgcggaactcatacatctcgcggaatttccagccggtatcgacatgcagcaacgggaaaggcagcgtacctggataaaacgccttgcgcgccagatgcagcatgacgctggaatctttaccgatagagtagagcatcaccggattactgaattctgccgccacctcgcgaataatgtggatgctttccgcctccagttgccgcaggtgagtaagtcgtatttgatccataaccgttcctttgcaataccgctattttcttgccatcagatgtttcgactatagggagcgtaagagaacgaatgaaattaccaattagaatgagtagttccttaacggaataacgatttggcaaagctaatatcaaaaagtgcttaaggcaccggatttcgggcgtttaggaagatttgaaattgttttagcgcagcggcagtttcatactatggcggtaaaaaaatttgcatggtatttaaggactcactatgttttccgcattgcgccaccgtaccgctgccctggcgctcggcgtatgctttattctccccgtacacgccagcagtcctaaacctggcgattttgctaatactcaggcacgacatattgctactttctttccgggacgcatgaccggaactcctgcagaaatgttatctgccgattatattcgccaacagtttcagcaaatgggttatcgcagtgatattcggacatttaatagtcggtatatttataccgcccgcgataatcgtaagagctggcataacgtgacgggaagtacggtgattgccgctcatgaaggcaaagcgccgcagcagatcatcattatggcgcatctggatacttacgccccgctgagcgatgctgacgccgatgccaatctcggcgggctgacgttacaaggaatggatgataacgccgcaggtttaggtgtcatgctggaattggcagaacgcctgaaaaatacgcctaccgagtatggtattcgatttgtggcgaccagcggcgaagaggaagggaaattaggcgctgagaatttactcaagcggatgagtgacaccgaaaagaaaaatacgctgctggtgattaatctcgataacttaattgttggcgataaattgtatttcaacagcggtgtaaaaacccctgaggcagtaaggaaattaacgcgcgacagggcgctggcaattgcgcgcagtcacggaatagccgcaacgaccaatccgggtttgaataaaaattatccgaaaggcactgggtgttgtaatgacgcagaaatattcgacaaagcgggcattgctgtacttagcgtggaagcgactaactggaatcttgggaataaggatggttatcagcaacgcgcaaaaacacctgccttcccggcgggaaatagctggcatgacgtaagactggataatcaccaacatattgataaggctcttcctggaagaatagaacgtcgctgccgtgacgttatgcggataatgctacctctggtgaaggagttggcgaaggcgtcttgatgggtttgaaaatgggagctgggagttctaccgcagaggcgggggaactccaagtgatatccatcatcgcatccagtgcgcccggtttatccccgctgatgcggggaacaccagcgtcaggcgtgaaatctcaccgtcgttgccggtttatccctgctggcgcggggaactctcggttcaggcgttgcaaacctggctaccgggcggtttatccccgctaacgcggggaactcgtagtccatcattccacctatgtctgaactcccggtttatccccgctggcgcggggaactcccgggggataatgtttacggtcatgcgccccccggtttatccccgctggcgcggggaactctgggcggcttgccttgcagccagctccagcagcggtttatccccgctggcgcggggaactcaagctggctggcaatctctttcggggtgagtccggtttatccccgctggcgcggggaactctagtttccgtatctccggatttataaagctgacggtttatccccgctggcgcggggaactcgcaggcggcgacgcgcagggtatgcgcgattcgcggtttatccccgctggcgcggggaactcgcgaccgctcagaaattccagacccgatccaaacggtttatccccgctggcgcggggaactctcaacattatcaattacaaccgacagggagcccggtttatccccgctggcgcggggaactcagcgtgttcggcatcacctttggcttcggctgcggtttatccccgctggcgcggggaactctgcgtgagcgtatcgccgcgcgtctgcgaaagcggtttatccccgctggcgcggggaactctctaaaagtatacatttgttcttaaagcattttttcccataaaaacaacccaccaaccttaatgtaacatttccttattattaaagatcagctaattctttgttttcaaacaggtaaaaaagacaccaaccttaaaccatccaaatctaccggggtacgcctgtttaacccaaatgtctggaactcaaatcccgtttccgtattcgttgcccatgccatcactacattgccttcttccgccagtccagctatttgttcccagatcatttcacgaatttttgcggatacatcacctacatatacccctgcacgtacctccaacaaccagatggctaatctgcctcgtaagcgcggaggtacattttcagtgaccacgaccaacatactcatttcagctactccgatggcctgcatctcccagactaacaggaagcggaatggcaacaggctgtgcatcttcaggtggggccggcggttgtatttctccagcggcaagcacgtcctctataagcggaatcaatttggctaatgttttactactgcgaaaaatatccctgcacgccaaacggacttcccggtccggctcaccagggttacgacgcgctatctcaaaagctttcggtacaacagtgtcaaatttaatgatgtctgcaatatcgtaaacaaaggaaagaggctttcctgtatgcacaaacccaatagctggtgcataaccagctgcaagtatcgccgcttcagttacgccgtataaacaggaagttgcagcgctaatgcattggttgatcgtatcgcccttttcccagtctttcggatcgtagcgacgtccattccatgtcacgccgtattgcttcgccagaagtgcgtaggttgcccgcacgcgactgccttctatacctctgagttgctctacggagcgccgggcaggcgcaggttctccaaaccgaagttcaaacattttacgtacgaccttcagacgcaaatcttcatccagagcaagttttgcctgatagagcagcttatcactacgcgcacctccaggctgaccagaagcataaacacgaacgcccgcttcccccacccataccaacaatgttccaacttgcgcagccaggcgtacagctgcatggctaacccgtgtaccaggttccagcatgatgcaggcaacgctgccaacaggaatatgagtgcggatccctgtcttgtcgataagtacaaacgcgccatctattacatcgatctgcccatattgcagaaagatcatggagacgcgatctttgagtggaatgggattaaggggaagccaggtcattttattacacctcaatcacagtggagccaaagatagcaagccacatcccatgcttttagctggcccaataccttgctgtacaagatctattaacgctggcgcgtcgttgatggtgagcacaccttcaaagcaaaccgtttggatctttccacttttaccatcaccagaaaaatactgtggccgttcgcttatgggatgcacatcttcaacgcgcgccgcattgcccaatttacgttgcaaccacgcgatttgttctgcttcttttattaacggaacccgacagcgtttaatattccctttactgtccaggcgcttttgattgtcgagaatagttttgatcggatttgcccgaagccgaaaatagagtggaacaccaacctgaagttgaaattcaacctgtttagttttaatgactgtcgcaacggcagtactaacaggcatttgcgcactctgcaataaaacatgacagccttctggtgtgtttcgcttctcaacatgaaaaagaaaatcacgagcagcatccggtctgtttggaaataaatgccataatccctggtgaagttggtaaagatccctgctccaggccctggcaatgatgactttactgagatacatccatacctcctttaatcacataccattctcgggaagcaaattgtcgaggcaaggtgatcatcggttcgtcgcgcgccgtaaattttaaatgatgccctgtaacactttcctcactatatatatcgccgccaacgggctcataatttaatagcgccttctgaggatcgcttgcctgacatgtccccaaaaaaagcgggtgtgttagtgggcaacttctccgccccaggtaaggtgtataccgaggctttaatactgctttttcaagttcactgataaccatcgttgcatggggtgttaaccagagagcgacggtaaaggaggcatcacataaatattcgcgccatgtttgaatcgtttcatgacttttcaaaccacggtaatcttctcgcgctccaaggactgtatggtaatcacgcaaccccgttacagacacacgacgatcgtcaagaatgagttcatcgcagcgcactgcaaattgcacactctcacttaacgcctgtaaactagaagtatcatcacgttggatcccaagacaagccccgagtagccctaataacccgcttcgggtcggaaatcttccggtaggtcgcgttccttcaaaggtcggctgcccccaggcttgcattggcccagcaagccgcaagatcaaataagatctcatgttcacgcctcgccattattacgaacccaggattttaactgttctaaagtaggcatttgtttaacttgagcagtaattgggtctacatcagataagctgaattgcgcagcagctccgttcagaccatatccattggcaacgcgatcccaatattgattaaacgcctgtatagacggttgcaaaaagccatctttcgctttaaccgctttttcaaaagcatttgccatagaaagtggcatatcggagaaattaaccattaccatatccgcagggttaaaagcggcataagtacgctgttttgctccagggacctctgttgccagcatatgaacaacatgggttgcaatttccagagcctgctccctggaggcaccacctaaattttcctgaagttgagcgaggttaatgttggcataacgataaaaaacaccgctactaaattcctgagttcccagatgtgcagaaccttgttcctgtaaatcatctacagcggtgaaccagtcaatatcagaatcaacctgatgagtagtgatcgcatgcgcaatggacattgcaccatcaacttttcccaactcagtcatcatgccgctggttgccattcttccactaagcgcaatatcaacaccctgctgtaaattcacacgtatggcggcaatatcttccttaagaactttgagcagctttttatcatccagattatcagcctctgcttttgcaacctgctcacagaaccaggctatttctcccacaacccagggagtaaccgcatcggcagaaatcttttcggcttcatcaacacttttaccggagagcagcgctaatgtcttatcgatgattttttggtcaaaacgttcaccaagtttttgccgaagaacatcacgtaattgtgcaagatgaatggttctgagactggattcaccaatattttgtgcgtaataaccacttttacgcatcgcacgtttaaggctttgactactaattcttactcgtcttttgccgccgaaaatagcgtctttctgcatgttcatatcgtcgcggttcagacaactagggctgtgagagatcagaacatgaatattgataaagttagacatagaaaggtttccttacgcatttttgtttgtggtcaatacaaaatcttccagaagttgctggcgttcgcgctttccccaccaggtcaacatcctggccattaatggccagtcaagtacgggttcggcgtgagtaagtaatcgacgtaactggaccatatcggctgttctgtcagcccgaattaattgaaagatacggcgctcgttaattcttccactattggctaaagctcttcccaagctgatacctgttgtttgctcgctttttttgtcctgatgtcggatgacattctttcctgcgctcaggcaaaacaccatgcgcaaaagagcctgctggtgacgtgggttttcccaaccaaaaggttgcaccagcctataaaacgcagggatatcgcgtaattcatcaggttcactaacacgtctaatttgcgcacaacttccattatccagttgttgccaggctcgatataaagccattgcatcaatttcatcagccattacttggccctccttgcggttttaactcccgtaaatgtttgtatagcgtggcgcgggcaagcgctaatgtgcttattaatttaggatgatgtgcatagggagctacagattgattaaatagcatttcacacaattgatgaagtttgtctcgtaaatcagctattacctcatcagcctgggaaaaattaacattcgccagtacatcgggaattaataattcactctgtcgatagaaatgcctttctgcagtctcatgaacagagactccggcccctttgaagtctttatttttaaacccttctgcaaaggtatataacgccttgcgtaaggctgttttatatcccaaaccaacagtcactatttcgtttatcacattgccgtattgttgccacccctgattaaacatcaacacatcatgacgccgttcaagaatagatgcttgattattacgatatccccccataatcaattcaagaggactttgcggcgcaatatttctgaattgattcacaaccgccgccacgcgatttccattttcattttgaataatcttatctaccacaactcggctgatttgtgtccaacttggtgcggaggtggtgaaagcaagaaatttttcctcaacctcccctttcttgactgttaccagacaaggggaatgcggatggggccatagcccattaactgtaaaggtaaatttttccttaagaaaaccggtataacgcaaattgctttcctgtccacagcaagaacatttaccaatcccaatgggatcgcataattcaatatgcgctggttgccagaatagaccacggacaaacccaatactgctagcaggtatagactcattggacttgataggtttaatccaggtaggttggttttccgtatgactttcattaggaaattgtttttgaagacgaggtaatgtgaggacattgagtaacaccgtactacgaagatcgatcccacgtacgaacgttgttacaggtgttcctccacgtaaaccgcttttaaaaccaccaccaaaacctggtgcctgattcgcctggttgaataacgcaatcgcagtgcatccaccacataatgcttcaccctgccccggttgattgacaaatgcacaattcgtcgcgccgcttaccccagccaacagtttttccattggagtcacatcatttgctttgacacctttggtctgcataaagggatgttctgcgtgattaaggtagaacatatctatccacggcgcgatgagttgttgaaactcatcttcagtgagcggattcattatgcgatgtcgaaattcaacgtcatcttttgccggggcgataatttgcccaatgcaaaccagcagtgctaaagcggccagttccatatcgtcacggggcaaacttaatcgccactgatctctactgcagtataggctttgcagatttatgatttggactttccccccgtttcgcgggcgtacagggatccagttatcaataagcaaattcatttgttctccttcatatgctccgacatttctcctgcatttctatacgtcggcacacttccgttatcggtaaaaacaaagaaaaaatacggcgtaattaattcaataatcacattcactgcaaaaatatattcattggtttaatacaattaacctatacatatattaagatgtgttgaattgtttaaagacaataatgcatgcatttcaaatctgcaagttattcgttttattattaaagaaacttttagttataataattaccatgaattttattacataaaatattcatactgtgaatataaaatctcataccgggaaattaaaagaagatgtacattgtgcaccttccctacttaagtagggataaaccgttattggtcttattatcgtcattgataacaatcattcccgaagttatttgggatttgcagggatgactctggtcatcccttcatcccctgtataggtaataacaatactgttaccctgccagacccatccatccagattctgtttcccttccagccaaagtaacccatcttcatctactacttcagaaaaactacgtttccaggtgaagggtacattgacgcgattaagtgcaagcgcctcatactgctgttcatgacttaggtcctcgtagacctggccatcgagcagttgtttaccactagacgtttgtacataaggcaataatggcaggctcatttccccatccctcgttaccgcaagaatggtttcatcgttatcctgcaagctatattcttcagcccactgcaggaccttgcgagccttgaaccttttttcacactcggcgctttcaaatttatccatgccattgccgacccattctggctcatccatttccgcatcatcgtaaatgctatccagccattgccggtaagcatcagggaaaaataaggatgctccattaagctcctcaatatgttgctgcgtccgccacatgactctaacgttgctataaatatgctcatgtcgtccgtaaccctcgccatcaggcagcaaaatggtggcaacaggaatctcaaaaccagcgggacgatatttgcgatgatggcgatgtaaacggcccaatcgttggaaaagcaaatctgcaggacaatgctgagtaattaaccaatcaaaatcaacgtcgagactttgttccacgacctgggttgcgacaagtatccgtccaacatttcgcttcccatttttgccgaaattgctaataactcgattctctttttcacgacgatcgttcagcgtaaagcgcgcatgaaacaaatctatatctacttgcgtgttatttagctcctttagccgttggtagcatacttgtgcaacgtcaaccaaattgcaaataagacagacctgtgcacccgcgtttgccgctgcgatcattcgctctaacatcgtaaggtcaggtaacatgtcagctaaacaaataggttctggctgaatgctaaagcggggcgggagttgttctggatgagctagcagatcaaaacgttgcgcaccattcacacctcgccagttaatgagtggatatgcggagttattttccactggatctgtatgcagaccataagtatccagaagtttctgtttttgtttcattggtagggttgcggaaagaagaataacactccctcccacatcagcctgagccttgagcactgcctccagcaagccgttcatataggtgtcgtaagcatgaacttcatcaacaattaaaacacttcgaccaattcccaaaccacggataaagcggtgtttaactggcaatacgcttatcaacacctgatcaatcgtgcaaacgccgatttgcccaagaaacactttcttattgctttgactcaaccactgacaacactgaacccacgcttcttcttgcccctgttcagtaatcgcgcgactttttatactttgaaagaggtggttaaaccgactattgccatgagcaagaataagatttggggaactaaataagtggctcgcgctcgcttccattctcgtaagcatagcattcgcggtagcttgtgttgggagggcaaaaataacactatccgcaatttgttgatcaataagtttccaagcataggccagcgctgtttccgttttaccggagcctgtaggtgcctctattaccgtcagcccgggagctactggaagagcatcaactaacacctgtaattgtctgggttgatagccattgtccagtagtgcatgaacaccttcataacatcgcttattacttacaagtccactcaactccaatacccggctcgcatcctgctgtcggtcctggaaatacgttctcagagcatttatgtcggaaggcgcatcctcattaaacagaaaggtattcgttgtagtccaggagcctaaccagtcagcaaggctgcaaaaacctgctaacagactactacaatcaggtggtatatcgtttatagataaccccgctggcgttaaaaataatgcttccagtacagatatccactcctcacgagcctgtttatcttgcgcagcataagatgccagagaagctggcatttcccaacggctcttatcttgatcctgggaatgtaatataaaaccatgatgtcctgtaacggcctctacccatggaaaccaggactcataaggatgaggagcggcatcaaaaaaactgaaaaaatccccgagagattgctcactaagactatcctggttaaaccaatacagaccggctgcaccatgattaaatttacggcacatttgtgtacttggaccattaagacttggcgttgcaggatttaatttcagccaactttctgcacttttatattggaatcgtatatcaaactttccaatatcatgaagagcaatgaaaaataacagccaggccttcaccctctgtttacttagcatttcatttcggcaaaaagtattttgcagtacgacactttgatcccaccagcaatctgcaacagcagcaacatcaaggcaatgataaattaacagatgaatatcatttcctttcgtcaagcttttactggattttccccagtaatggcatatatatttaaaaggttccattaatagcctccctgtttttttagtattatcgatgatatcagcgggctatttttcgatgctgctcataaatatcgaattacagtgatatacacatgtcttgcctccctgcaaagaagagactaacattcgaattgtttgggttcgaacgctggcctcaggttgatagaaatatcgcctggggcttttgtccatctggaacctcgcgaatgcttaacgccagacagcctcaagcacccgacgccattctatacctgataattcttcccgcggcgttcacgtttaaaatcaggaatgctgctcgcaaaataaaaacgcccccatcatttctgacagaggcgtttaatttgtccggcaatatttacccttcgtgtaacccacattccctttttaagccaaagaaacgcgtttcttcttccgccatgccgggttcccatttacgggttgtatgggtatcgcccacgcttaaatatccttcatcccataatgggtgatatttcaggccatgtttttgcaggtactgataaatagttcggttatcccagtcgataatcggcagcactttaaatacgccacgctgaattgccagcaccggtaaattggcacgactgccggattgttcacggcgcaggccagcaaaccaggtttgcgcattcagttctttcagagcccggttcatcggttcgactttgttgatgtcattgtacttttcaatgccttcaacgccctgctcccacagttttccgtagcgtgcttcctgccaggctgcgctttcggtagcacggtacactttcaggttgagcttgagtttgtccgttaactcgtcaataaagcggtaggtttccgggaacaagtaacccgtatcggtgaggatcaccggaatatccgggcgaatttgattcaccagatgcaggctcaccgccgcctgaatgccaaagctggaagaaagtacatattcaccgggcagattatccagcgcccaggctacgcggccttcagcgtccagtttttccagttcggcgttagtttccgccagcgccagaatgcgatctaccttcggcagttcgttcagggcgtttagatcgagtttggacatagattcctcactgtttgccttgcctgatgcgacgctcacgcgttcttatcaggcctacaagaccgggctgatggttaatcccacaaatcacgcgccggatcgagcaccgggcgaatgatgcccgcacgcaccgtaaagtcgccgaagccttcacccgcttcgcgctctttcgcccagcgccctatcagttcatcaaggctcgccaggatttccggctcggtgatgttttctttatacatccgtgggatacgtgtcccaatgcggttgccgccaagatgcaggttgtagcgacccggcgctttacccaccaggcccacttccgccagcatcgcgcgaccacaaccgttcgggcagcctgttacacgcatcacgatatgctcatcgctgacaccatgtttcgccattaaattatcgatgttgtcgataaaagacggcaggaaacgctctgcttccgccatcgccagcgggcaagtcgggaaactcacgcaagccatgctgttttcacgctgcggcgtgacggcattcattaacccgctctctttggcgatcttctcgatcttcgctttctcgctttccggtacaccggcgatgatcagattctggttcgccgtaatgcggaaatcgcctttgtggatcttcgcgatctccagcaggccggttttcagcggacgcgccggataatcaaggatgcgaccattttcgataaacagcgtcaggtgccagttatcatcaatgcccttaacccagccaatacgatcgcctcgtccggtgaactcatatggacggatcggttcaaatttgatccccgcgcgacgctccacttccgctttaaacgtctcaacccccacgcgctccagcgtgtatttggttttggcatttttacgatcggttcggttaccccagtcacgctgagttgtcacgacggcttcggccaccgccagcgtatgctccagcggcagatagccaaactcactcgcggtgcgggcgtaggttttcttgttgccgtgttcgatggaaagcccaccgcccaccaacaggttaaagcccaccagcttgccgttttcggcgatcgccacgaagttcatgtcgttggcgtgcagatcgatatcgttctgtggcgggatcactaccgtggttttgaatttacgcggcaggtaggtctggccgaggatcggttcttcatcagtagtggcgactttttcctggtcgagccagatctccgcatacgcgcgggtacgaggcaacagatgctcagaaatcttcttcgcccactcgtacgcttccgcgtgcagctggctctcgtaagggttgctggtgcagagtacgttacggttcatgtcgttagctgtcgccagcgcatcaagaccgacgctgtgcagcatctggtgcaccggtttgacgttctttttcagaatgccgtggaactgaaacgtctggcggttggtcaggcgaatgctgccatagatggtgttttcaccggcaaatttgtcgatcgcctgccactgtttagtggtaatcaccccacccggcagacgacagcgaagcagcatcgcgtggcgcggctccagcttctgttcagcacgttcggcgcggatgtcgcggtcatcctgctgatacatgccgtggaagcgaatcagcaggaagttgtcgcccttaaagccgccggtcagaccgtcgtttaaatcttccgcaatggtgccgcgcaggtagttgctttcatgcttcatgcgctcggcgtctgtcagttttccttcgaccactaaaggccctggatgtttttcgctcattagtagacatctcgctgataacggcgctctacgcgcagctcacttaaaaattcatccgccgcttcggtgtccatgccaccaaattcggcaatcacttccagaagtgcctgctcaacgtctttcgccatgcgattagcgtcgccgcagacataaatgtgggcaccatcattgatccagcgccacagctccgcgccctgttcgcgcagtttgtcttgtacgtaaactttttctttttgatcgcggctccaggcaagatcgatacgtgtcagcacgccatctttgacgtagcgctgccactccacctggtacaggaagtcttccgtaaagtgcggattaccaaagaacagccagtttttacctggcgcttcgtcggcggcgcgttgctgcataaaggcgcggaacggcgcaataccggtgcctgggccaatcataatcaccggggtttctggattggctggcaggcggaagttatcgttatgttcgataaatacgcggacttcgccctcttcttccacgcggtcagcgaggaagctggaggcaccaccggcacgggcgcggccttccacgtcgtaacgcaccacaccaacggtgacgtgtacttcgttctcgacttccgcctggctggaggcgatggaatacagacgcggcgtcagcgggcgcagcagattaattagcgcttcggcatcaagctgtgccggggagaaacgcaccatgtcaacaatcggcgtcgtcgcggcgtaatgctgtaacttcgctttatcgcccaccagcggcagcagtgtttcactgcgggtaagcgtggcgtaattctcaacaatgttggcggtgttgacggtcagttcgaagtgccactgtagcgcttcgttcagaggcaacgttttgccctcgacggtgacaggttcatcgcctttcagccacagcagttcgacaagttctttcaccagtgccggatcgttctgataccagacgcccagcgcgtcacccggctggtaacgcatgccgctgtcacctaagtcaatttcgatatggcgaacgtctttttcagagttacgcccggtaattttctggttaacagagaggctagccaccagcggcgcgtctttgctgtacgggctggtgtggatttcatttaccgcgccagtagcgacggattggctaggtgccgcgacaggcgcacggcttttaagcgcatcaaccacgcgggcgcgccactcgctggcagcagcctggtattcaacatcggcatcgacacggtcgagcaggcgttcaccacccagttccgccagcttgctgtcgaaatctttcccggactggcagaaaaattcataagagctatcgccgaggctaaacacggcaaacgcggtgttttccagctttggcgcttttttggagaacaggaacttatgcagcgcgacggcttcttccggcggttccccttccccttgcgtactcgtcactacgatgagcagtttttcgctggcgatttgtttgaatttatagtcgcccgcgttcaccagcttaacgttcagttttgctgctaataaatcatcacgtaatgcttcagcaacccggcgcgcattgccggtttggctggcggagataatagttatacccggcatttctgcggctggcgctggcgtcgctgcaagcgcagcaggctgctgattgagtacgccccagaaatagccagaaacccaggcaagctgggtgggagttaaatcggtcgtggccgcctgaaggcgtgccagttgctccgggttcaacggaagcaacgcggaaggtgggacctgtgtcgtcatgcgtcgttatgttccagtaagcaaagctgtttctgcgccctgtcagcgcccataaaacagaagagaaggtaaggttaacggggcaaacggtgtggattaaagacgggatagcgataactaataaccaaatcgactaacctgttttagcaatagtctttaacaacaaaatagattaaccaacctaatgaaaaacaaatgaatttagccaatcattaagataaatcagcgattttgcgcaacaaagtcgttttagataatgcgaaaaaacagcctttccggtactctacggcggttttatcgtcctgtagagaaattatgatgtccaccacgttatttaaagatttcaccttcgaagccgctcaccgcttaccacacgtcccggaagggcataaatgtggtcgcctgcacgggcattcctttatggtgcgactggaaattaccggggaagtcgatccgcatacgggctggattatcgatttcgctgaactaaaagcggcgtttaaaccaacctacgagcgcctcgatcaccattatctcaatgatattccaggtctggaaaacccaaccagcgaggttttagcaaaatggatttgggatcaggttaaacccgttgtgccgctgttaagtgcggtgatggtaaaagaaacctgcaccgcaggttgtatctatcgcggcgaatgataagagtgtgtcggcggtcaatttcccttaagtaacgctatgttagggtgttgtgttctggatatctggggcatgacatggaagacgactgcgacattattattattggtgccggtattgcaggcaccgcttgcgcgttacgctgcgcgcgagcgggtttatccgttttgttactggaacgcgctgaaatccccggcagcaaaaatctttccggcgggcggttatatacccatgcactcgcggaactcctcccgcaatttcatctgaccgcgcctcttgaacgacgcatcactcacgaaagcctttccctgttaacgcccgatggcgtaacgacgttttccagcttacagcccggcggtgaatcctggagtgtattacgtgcacgattcgatccgtggctggttgccgaagccgaaaaagaaggtgtcgaatgcatccccggagcgacggtggatgcactgtatgaagaaaacggcagagtctgtggcgttatttgtggtgacgatattctccgcgcccgttatgtggtgctggcagaaggtgccaacagcgtcctggctgaacgtcacgggttagtgactcgtcctgctggcgaagcgatggcgttggggatcaaagaagtgctgagcctggaaacatccgctattgaagaacgttttcatctggagaataacgaaggcgcagcgttgctgttcagcggcaggatctgtgatgacttacccggcggcgcatttctttatactaatcaacaaacgctcagcttagggattgtttgcccgctctcttcccttacgcaaagtcgtgttccggcaagcgagctgctgactcgctttaaagcgcatccggcagtgcgcccgcttatcaaaaacacggaaagtctggagtatggtgcgcatctggtgccagaaggtggcttgcacagtatgccggtgcaatacgccggtaacggctggctgctggtgggcgatgcgttgcgcagttgcgtcaataccggaatttccgtgcgcggcatggatatggcgctgactggcgcgcaggcggcggcacaaacgctgataagcgcctgccagcaccgcgagccgcaaaatctgtttccgctttatcatcacaacgtagagcgcagcctgctgtgggatgttctacagcgttatcagcatgttccggcgcttttgcaacgcccgggatggtaccgtacgtggcctgcgttaatgcaggatatttcccgcgatttatgggatcagggtgataaacctgttccaccgctgcgccagttattctggcatcatttacgtcgtcacggcctgtggcatctggcgggcgatgttatcaggagtctgcgatgtctgtaacgtaagatgttatcaggagtctgcgatgtctgtagcccgtaatctctggcgcgttgctgatgcgccgcacattgttccggctgactccgttgagcgccagacggcagaacggttgattaacgcctgtccggcaggtctttttagcctcacaccggaaggtaacttacgtattgactatcgcagttgcctggagtgtggcacctgccgtttgctgtgcgacgaaagtacactacaacagtggcgctatccgccttccggattcggcatcacctaccgctttggataaataataaggataatttatgcccctcttacacctgctccgccagaatccggtgattgctgccgttaaagataatgccagcctgcaactggcaatcgattctgaatgccaatttatttccgtgttgtacggcaatatctgcaccatcagtaatatcgttaaaaagattaagaacgccgggaaatatgcttttattcatgttgatttgctggaaggcgcgagtaataaagaagtcgttattcagtttttgaaactggtgaccgaggcggacggcattatcagtaccaaagccagtatgttgaaagcggcaagagcggaaggttttttctgtattcatcgcctgtttattgttgatagtattagctttcacaacattgataagcaagttgcgcaaagcaatccggattgtattgagatcctgccaggctgtatgcccaaagtgctgggctgggtgacagagaaaatccgccaaccgctgattgccggtgggctggtgtgcgatgaagaagatgcgcgtaatgcgattaacgcgggtgtcgtggcgctttccaccacgaataccggggtctggacgttagcgaaaaaattactttgacgggataatcgtaaccaattgaatttggtttgatttgtaggccgcacgccacatccgacattcagcgcctgatgcgacgcttgacgcgtcttatcaggcctacaagtccccaggccagaaccgtaggcaggatcatccggcaacacgttattggcaatctgcgtgaatgtttgtcaccagtgcctccagcaccactttccagtcatcaaccacgccaacatctgcctgactaaataccgcagcgctggcgtcatgattaatcgccaccacaaacttgctattgcgtacgcccgccattaacgctgctgcgccagaagcgccaacaacaatacacacctcaggtgccagcagatgtccggaaataccaatcactttttcagcatcaacgccaccgttcatcactcgcgcccgactgtagcccacttcggctcccagcttttctgccagcatagcgatttcctggttatctgcctctccgccctgccccaccaccagcacccgtctggcctcagctaatgggtcgcgggtaacatttttcagatcctctgtgctaaccagccagtccggaagcgcacccgggacaatgttcagttgttgcattccagagggcaacgtggcgtttttcgctgctcccgcctgacgcgccagggaaaggcatagcgggcgtttttctgtttgcagcgtcgccgttagcgcatttccccagtgggatttgcgcacgcttacggttggaatatctaagctagtcacctggcagatgcttgcaccatgtaaacgccaggccagccgggtgctcagttcatcgccaaacgttcccggcggaaagagaacaacgtccgcaggcgttcgctgccactgttccaccaacgcatccagcacctgttccgccactacaggctgaggttcaatctgccagtgcgccagggtacaaccgctgaaatcctgcgccgccagccagcttgctattgcggcattctcctgatttattgtcacaattgcgatattcatggctgcatcctttggcgtaaatagtcctgccatagcttttgagctttttctgctaccgtttgcccatcaatcagcgtcgctccgcgtcgttgctctgctcttgccagttgcagacactgcatcgctggcatttcggcagcaacagttttacggataatttctgctttccccgcagccattcgctggcgcattcccggtactggcaaggccacttcaccgcactgacgcacggcaatcaccgcaggcaagcgaacccggcaacaacgcaacccatgttcagtacgctgttcgagggtgataaacagcgcgtcgagagtgaaacgctccacctgggtgaagcagggccagcccagcatttccgccagcaaaaatggcgtttgcccattctgcccttcgctgctttggcagccggtaattatcagatccagcggattctgatgctgccattcggcaatatggcgagcgacaaattccggcgcaaagcgcagatctgccgccgtctccagcaatacagcttcctcaaacccaagagccatgagatagcgcagccagtgcaatgcccgttcatcccccatgctcaacgcggttaaagacatcggcgtaccgttttttctctgcgccaacagcagcgcggcagcggcctgttcatcagcaccgagtaaacttcgcagtaggctaatatccggtccgcttttaccctgagccgccgcctgccactctttttccgccagcattccggcatccggttcggctttaaacgctaacagaatgttcattcgcacctcctacatttcccgccgccaccagcgggagggctttagtttctggtgcccatagccaggtcacaacaaaaccaaccaacaacactgtcgccaggagcaataaggtgacttgcattccccactgcgccagcacccacggcagcaggccagtacttaccgccgcgccaagtcgactcatggcagtggcaaaaccgacgcccaggctgcgaatgtcagtaggaaaactttccgcaggcaaaatgcccaccagattactgactgcgctaatggtggtgctgaagagaacaaaaagcagcagcgttaaactactgccggaaggcaaacaggccatgactaccagcgttgccgccagcagcaaaaaacttcccagcaaaaatttgcgatgtgccagcaggtgcgtcagaactaatcccagcagcgcgcccacaattaacaacgcattaagcatcaggctggcagtcagcgcatcttccagaccaatagtctgggcgatagttggcagccaggtataaatcacaaaccatgggattacgaggcagacaaagaagacgctgttaaacgccgtgcgccgccagtaacggctagagaacaaggttttgatgtgtttatgggtcgccgttaccacttcatcgcccagtaaaacatggggaccaaaatagcgatgcacgatagcgtgagcttctgcaaaacgcccctggcgcagtagccagcgtggactttctggcgttccccagcgtaataacgtaatcaacaacgcgggcagagctgcgcttgccagtagccagcgccaggcctccgggttttcggaaataaagtgatgtccggcaatacttgccagcacatagcctacggtccacaccacgctgaatgcgcccagcaaaataccgcgatggcggcgcggggaaaattcagccagcaaggtgtgacctacactataatcgcctcccagaccaatgccaatcaaaatgcgcagtccaataagatgctctggcgtggtggcaaaaaattgtaaaaagctagcaagcgtaatcagcaaaaagctgaaggtgaagattttttgccgaccaatatggtcggagatccacccaagaaccaggctgccaaggaacaaaccaaggagcgcgctgccgccgatcattcccgccataaacggcgtcagttgcatggcgggcgtaagctgaataatggcgtaaccaatgacgccgagaacataaccgtcggtcaggtgtgcgccgaaagtgagcgcagcaatgcggcagtgaaaacggttaagcggtaaatcatccattcgcaccggactagtgttcatctttaccccttcattgtccggtaataagaacggcttctcgcctgagaagccgaaaaggcaacgccccgtcatcgcggaacgctgcctgacacattatttttcaatcggatagatagtacccgtattcataatgccattaggatcgaactgctttttcagcccttccagcaacgcccacgcgctgccgtgttccagtttgctccagtgaacgcgatgtttaccgataccgtggtggtgcaccatgctaccgccgaggcgaatggtttcttcacagatgatcttgttgagcggattgtggtacttgtcgatttcctcttccggcttacagtcaacgacgttgtaatcgtagacgaagtacatgttggtgccgttctgatagctatgagaggaatgaccgcccagcatggtgatgtcgtcggcgtgcgggaactcagtacgaatacggttaataacgctttcgtagatttcgtggatgcagctccagcagccggatacttcggtggtaaagcccatgttgccggttttgaggatctgcacacgttcggcagccactttatccggtccccagttcaggttgttaaaccaggtttcgatcagcttgctgtccacgcgctggcattgcgggtagcgggcaacgatttccgcaatcccttcgcccgtcaccttcgcaatgcgagggttaccttcagccataaagatcagcacgcattttccgtcggcaaaatgggtgaagtgttgggtgccatcttcagcgtcatacaaacgagcgatactcggacgatacccttccaccatgatttcacgcaggatgttgaagccggttttcatgtcttccaggatatagccgtagaagaggttgttttccggggtgaatttaaagattttcactgttacttcagtgatatagcacaatgcaccttcgttgccgatgatgatgtgacgaatgtccgggccagccgcgcggcgtggcacgtttttaatgcgtgtgacggtgccatcagccaatactgcttccagaccaacgaccatatcttcgattgcgccgtagagtgtggagaactgcccgatacttcgggttgctaccaggccgcccatctgcgccagcggcttactctgcggagaatgccccgtggtgtaacctttttcacgcaacgcgttttccagcacttccagcggaacaccacattgcgccgtcgcctgcatattctcaatatcaatattaatgatttgattcatggcggagccgtcgagcaccacgctgttttctacaacagtttccagcccaccttcggtggcggaagcaccggtacgcggcacaccgttaattttgtgcgcattcataaaattcagcacacgggatacttgctctgtggaaccgagttttacgaccgctgccggaatcggcaaagtataaatgccatgaatatccggaaatttacgaaaacggtcaatactgtttttctttaatactgtttcatcggtaattacgcgatctgcaccaacaatttcctttagctggtcgacaatcgctgcgcgagataaagacatagtaattccttcctgataataaaaatggaataatcattaataagagaaaacagaaaccaccgttatgggttagcgcactaaataaccgccatcaaccactaataaatgcccgttgacataattgcttgccggacttgcgaggaatacggctgcgcccattaaatcctgagtatcgccccaacggtttgccggaatatgatcaagaacgcgctgattggtttctggattactgcgtgtcgccagcgtaatatctgttgcataatagccaggggcgataccatttacctgaatattatattgacctagttcatcacaataagctttggtgaacccggcaagagcatgtttagtggcagaatatgcaggactccattgtccacctaagtaagagaacaaactacagatattaataattttgccgcttttctgcgggatcataatttttgcagcttcatagcttaactcgaatgcggcggtcaggttcacatcaatcatcggatcccagtcggcacgaccgaagtccagcaccttattcagcttacaaataccggcattgttaaccagaatatcaactgtaccgaaacgctcacagcaagcagcgataatcttctgcggcgcgccttctgcggtgatacccacctgcatgaagtccacctcaacaccctgtttttcaatcatttcctttgtttcgccgttatctttgacgaaactaggaataaagatatttgcgccagctttggccaacgccatggcaaatgcctggcctaaaccgctattcccaccggtaacaattgcggttttacctttcagggagaaaaaatccatactgaacgcattgagagattcgatactcatagttagctccaatttccgtaaggcaaaaaaaaagaaaggtaacttcccccgcgagagggaagttacctttctcattatctctggtaactggagataatttttagcataagggcataactgctaatgtgatcgtaatcacagtgtgatattcgtattgtcaaataattttaaaaagcagaagcgtgattactctcacacaacacctctgctttccatgttatttattatttcaattactagagacctgagaaaagtaatccacctgaaagggcggcttacttttctcttttttttgtctattacaaatgggaatacgatatgcaacacaacagttatcgccgttggataaccctcgcgataattagttttagcggcggcgttagtttcgacctggcttatttacgttatatttatcaaattcccatggcgaaatttatgggattcagcaataccgagataggtttaataatgagtacctttggtattgcggccattattctttatgcccccagcggcgttattgccgataaatttagtcaccgcaaaatgattacttccgcgatgatcattaccggattactgggtctgttaatggcaacgtatccaccgctgtgggtaatgctctgtattcagatcgcctttgcgataacgacgattttaatgctgtggagcgtgagcattaaagctgcaagcttgcttggcgatcatagcgagcaagggaaaattatgggctggatggaagggctgcgcggcgtcggtgtaatgagcctggcggtgtttaccatgtgggtcttttctcgctttgcaccggatgacagcaccagcctgaaaacggtcattatcatctatagtgtggtttacatcttgttggggattctgtgctggttttttgttagcgataacaacaacctgcgcagtgccaataacgaagaaaaacagagtttccagcttagcgacatcctggccgttttgcgtatcagcaccacctggtattgcagcatggtgatttttggcgtcttcaccatctacgccattctgagttactccaccaactatctgaccgaaatgtatggcatgagcctggtggcggcgagctacatggggattgtgatcaacaaaatattccgcgcgctgtgcggcccacttggcggcataatcaccacctacagcaaagtgaaatcccctacccgcgtgatccaaatcctttccgtactcggcctgctgacgttaactgccctgctcgtcacgaactctaacccgcaaagcgtcgcgatggggattggcctgattttactgctgggattcacctgttacgccagtcgcgggctgtactgggcctgccctggcgaagcgagaacaccgtcttacattatgggcaccacggtaggtatttgtagcgtgattggattcctgccggatgtcttcgtttacccaattatcggccactggcaagacaccctgcccgctgcagaagcctaccgcaatatgtggctgatgggcatggcggcgcttggcatggtgattgtctttacctttttgctgttccaaaaaattcgtactgctgatagcgcccccgcaatggctagcagcaagtaagccaggaaaattacaggagaaaaatcatgagcaaaaaatacatcatagggattgatggcggaagtcagagcacaaaagtggtgatgtacgatctggaaggtaacgtggtttgcgaaggcaaaggcttattacagccgatgcacacgccagatgccgatactgcagaacatcctgacgacgatttatgggcaagtttatgttttgccggtcacgatttgatgagtcagtttgccgggaataaagaagatattgtcggtattggtctgggatccatccgttgctgccgtgcgttattgaaagccgatggcacgcctgctgcgccgttgattagctggcaggatgcacgcgttacacgcccttacgaacacactaaccctgacgtggcatatgtcacctcttttagcggttatctgacgcatcgcttaaccggcgagtttaaagacaatatcgccaactattttggtcagtggccggtggattataagagctgggcatggagcgaagatgctgcggtaatggataagtttaatatcccccgtcatatgctgtttgatgtgcaaatgcctggcaccgtcctcggacatatcacaccacaagccgcactggcgacacatttcccggcaggactgccggttgtttgtaccaccagtgataaaccggtagaagctctgggggccggattactggatgatgaaacggcggtaatttctcttggcacttacatcgcattgatgatgaacggcaaagcactgccgaaagatccagtagcgtactggccgattatgtcttctattccgcaaacattgctgtatgaaggttacggtattcgcaaaggcatgtggacggtgagctggctgcgcgacatgctaggcgagagcttaattcaggatgccagggcgcaggatcttagtccggaagatttactcaacaaaaaagcttcttgtgtgccgccaggctgtaatggtctgatgacggtgctggactggctgaccaatccgtgggaaccgtacaaacgcgggattatgatcggctttgattccagcatggattacgcatggatatatcgtagcatactggaaagcgtggcgctgacgctgaagaacaattacgacaatatgtgtaatgaaatgaatcactttgcgaagcatgtgatcattactggcggcggtagcaacagcgatctgtttatgcagatttttgccgacgtgttcaaccttccggcacgacgtaacgccattaacggttgtgcaagcctgggggcagcgattaatacagcggtaggtctggggctatacccggattacgcaacggctgtcgataacatggttcgcgtgaaagatatctttataccgattgagagcaatgccaaacgctacgacgcgatgaataaaggcattttcaaagacctaaccaaacatactgatgtgatcctgaaaaaaagctatgaagtgatgcatggggaattggggaatgtggatagcatccagagctggagcaatgcgtaagtgaggaaggccgggcgggaaactgcccggcctgaacatacctgaatggttatccccgctgacgcggggaacataagttcgacaacttaaaaaatgataacaagtccggtttatccccgctgatgcagggaacataataaaaactttaactagttcggtttatccctgtttttacaaggaatattaactacactcgatgtctttagaataaaagacaatacgaatcgcactttatcaattttcacttaaagtatgaactggatatctttattcataagaactattcatcaacagcgtatagaggcggttatgtaaaaccactcattagcctcaaaacaaagacaaacttccagatttattacttaaccaatgaataacaagcttaaaaaatatactgttattctaaagaaaaaattaacaggcattaattcaatattaaaaaaataatagattaaaatttcttaacgatttaagaatcatacaaataacactttgattaaatttaattttttgtatcgataattgtgaacctctctggcatggagaactattttgaacatgaggtgttacgtggatatgttgcttattacaagtactgctaatataaaaacttgagaaagagataacgggttatatggtggtttatccccgctggcgcggggaactcgacagaacggcctcagtagtctcgtcaggctccggtttatccccgctggcgcggggaacacctgttttcgcaaatctatggactattgctattcggtttatccccgctggcgcggggaacacgggcgcacggaatacaaagccgtgtatctgctcggtttatccccgctggcgcggggaacactggctctgcaacagcagcacccatgaccacgtcggtttatccccgctggcgcggggaacacgaaatgctggtgagcgttaatgccgcaaacacaggtttatccccgctggcgcggggaacacattacgcctttttgcgattgcccggtttttgccggtttatccccgctggcgcggggaacactctaaacataacctattattaattaatgattttttaagccagtcacaatctaccaactttatagtatcacacaaacaacacatccattatgttaaagagcacttaatccattgattaaaaaggtaaatatttaaaataactctatacaaactaaaatctaccaaactttaccgcaataattttcactccagcgaaaaattaatgccacagaatttgtagagaatgctaatgattagccctggatgggtaaaatggaggagttttcagaggcgacaaacaatataaatgagtagaagtctttacaggttccacccatttataacgcttataaatgtttaatcaggcaatatttagatatttatgtgtttgcatgctcaaacgccaattacgcgcaatgcaggtttcaatgcacaaacgtgtggcatcatccttttggctaatcggctgcagtgcaatgactcgcggtttatcatcggtcagcgttgccagtagttcatccagtgcttcaatatcgcgtacgcgccccactggatgcttgatttcgttggctcgctccagtgcctgactcaacacttcatagccgccgcgcatgttcagctttgggcttacggtaacccaggtattcggtgtgcagcgtacctcatgagtaccactggtttcgatctggcagctaaaaccgttcttttcgagcagatcagtcagtggcagcaaatcatgaatgcaaggctcaccacccgtaatcaccacatgccgcgcggtgtatccctggcgaccaatgacagccagcaaatcttcactgctcgcagccccccacttatcactctctttggtcttcgccagaatgctgaaaagggagacttcccgatcctcaagcttttcccaggtgtgtttggtgtcgcaccaggcacagccaaccgggcatccctgtaaacgaataaaaatggcgggaacgccggtaaagtaaccctcaccttgcagggtctggaacatctcgttaatcgggtactgcatagcattctctgtgaagtggataattgttaattattgcagatcctgccacaacaatcatgtcttattaacattctgttacaggcaggtttaaagaaaaatgcgaaacatatcgttaataattaaagggagtaacgtattatgtcagaagaaaataaagaaaatggatttaatcatgtcaaaacattcaccaaaattatatttattttttctgtattagtttttaatgataacgaatataaaattaccgatgccgccgtcaatttatttatccagatttaatgagaaatttataatgcgctatttcatactaatgttcactttcgtatgttcctttgttgcagcccaaccaactattgtcccacaattacagcaacaagttacggatcttacgagtagcttaaacagtcaagaaaagaaagaactgacgcacaagttagaatctattttcaataatacccaagtgcaaattgccgtattaattgttcccacaaccaaagacgagacaattgaacaatatgctacaagagtttttgacaattggcgtttaggagatgccaaacgtaatgatgggatactgatcgttgttgcctggagcgatcgcactgtccgcatccaggtaggttatgggctggaagaaaaggtaaccgatgctctggctggagatatcatccgtagcaacatgatacccgcatttaaacaacaaaaattagctaagggattagagctagctataaacgctttgaataaccaactcactagtcaacaccaatatccgactaatcctagtgaaagtgaaagtgcgtcttccagtgatcattattactttgctattttttgggtatttgcagtgatgttcttccctttctggttttttcatcaaggcagtaatttttgtcgcgcatgtaaaagtggagtctgtattagtgcaatctatcttttagatttattcctgttctccgataaaattttttccattgctgtattttccttcttttttactttcaccatatttatggtctttacctgtttatgtgtacttcagaaaagagcatctggtagaagttatcatagtgacaacagcggttccgctggaggcagtgatagcggcggatttagcggcgggggcggttcttctggaggtggcggcgcatccggccgctggtaactcaaccataaaaaatgccagcccggaggctggcatttttaaatcagataaagtcagtcttatgcctggcctttgatctctttacgaccgttgtacggtgctttttcgcccagagcttcttcgatacgaatcagctggttgtatttagcaacacggtcagaacggctcatagaaccagttttgatctggcctgcagcagtaccaacagccaggtcagcgatggtagcgtcttcagtttcgccagaacggtgagagataactgcagtgtagccagcatctttcgccatcttgattgcagccagagtttcggtcagagaaccgatctggttgaatttgatcaggatggagttagcgatacctttttcgataccttctttcaggatcttggtgttggttacgaacaggtcgtcaccaaccagctggattttgtcgcccagaactttggtctggtatgcgaaaccgtcccagtcagattcgtccagaccgtcttcgatagaaacgatcgggtactgtttggtcagttcttccaggaagtgagtgaattcttcagaggtgaacgctttgttgccttcgccagccagaacgtatttaccatctttgtagaattcagaagctgcgcagtccatcgccaaagtgatgtctttgcccagttcataaccagcagctttaacagcttcagcgataacagccagagcttcagcgttggaacccaggttcggcgcatagccaccttcgtcaccaacagcagtgttcatgcctttcgctttcagaacttttgccaggtgatggaaaacttcagaacccatgcggatggcttctttcacagttttcgcgccaaccggctgaatcatgaattcctggatatcaacgttgttgtcagcgtgctcaccaccgttgatgatgttcatcatcggaaccggcatagagtatttgcccggagtaccgttcagttcagcgatgtgctcgtacagcggcatacctttagcagctgcagcagctttggcgttagccagagatacagccaggattgcgttcgcgccgaatttggatttgttttcggtgccgtccaggtcgatcatgatcttgtcaatgccagcctgatctttagcatctttgccaatcagcgcctgagcgatcgggccgtttaccgcagcaacagctttggttacgcctttacccaggaaacgggatttgtcgccatcgcgcagttccagagcttcacgggaaccagtagaagcaccactcggagcagctgccataccgacgaaaccaccctccagatgtacttcggcttcaacagtcgggttaccacgggagtcgatgatttcacgaccgatgatttttacgattttggacattaggttttcctcaagtcactagttaaactgaaactccagacaaacaacgcgtacccagggtacgcgttgccgctctaacttttttacttacttcgcctgacgtttctggaactcgctggcggctttcacaaagcctgcaaacagcgggtgaccatcacgtggagtagaagtaaactccggatggaactggcaagccacgaaccacgggtgattcggaacttcgatgatctcgaccaactgatcatccccggaacggcccgcaacgcgcagacctgcatcttcaatctgtttcaacagcatgttgttgacttcgtaacggtgacgatgacgctcaacaattgtcggcgcattgtacagctggcgaaccaggctatcgtcaaccaactggcactgctgtgcgccgagacgcatggtaccgccgagatcgctcttctcgctacgaacttcaacgttgccgttttcatcgcgccactcggtaatcagcgccacaaccgggtacttacagtctggcacaaattccgtagagttggcgttctccatgttggcaacatggcgagcgtaatcaattaacgccacctgcatacccaggcaaatgcccagataaggaatattgttctcacgcgcaaaacgcgcggtcgtaatcatgccttctacgccacgatagccgaaaccgccaggtacgaggattgcgtccagacctttaaggatttcaacgccgcgcgtttcaacatcttgactatcgatcagtttgatgttgacgctgacacgattcttcagcccaccgtgtttcagtgcttcgatcacacttttataagcatccggcagttcaatgtacttgccgaccataccgatggtgacttcacttaccgggttcgcttcttcgaagataacctgttcccattcggacagattcgcttccgggcagtttaagctgaatcgtttacaaatataatcgtccagcccctgagatttcaacaggcccggaattttatagatggaatcgacgtctttcagagaaataaccgctttttccggaacattacagaacaatgcaatcttcgcacgttcgttcgccggaacagcgcgatcactacgacaaatcaggatgtcaggctggataccgatggagagcagctcttttacagagtgctgagtcggtttggttttgacttcaccagacgctgccatgtacggcaccagcgtcaggtgcataaacagagtgtgctcacggccaatttcaacagccatctggcgaatcgcttcgaggaacggcaaggattcgatatcacctactgtaccgccgatttctaccagtactacgtcatgaccttcgccaccttccagcacgcgctctttgattgcgttagtgatgtgcggaataacctgcacggttgcgccgaggtagtcaccgcggcgttctttacgcagaacgtcagagtagatacgacccgtggtgaagttgttgcggcggctcattttggtacgaatgaaacgctcgtagtgccccaggtccaggtcggtttcagcgccgtcttcagtaacgaacacttccccgtgttggattgggctcatagtacctggatcgacgttgatgtacggatccagtttcatgatggtcacattgaggccacgggcttcaagaatggctgcgagggaggctgcggcaatgcctttacccagagaggatacgaccccgccggtcacaaaaatatagttcgttgtcatgctgaacctgagaagttaggttgaaaagacgatggaataaccaagacgggaaagcagtatacccgaacatgacctgtgccacaaactttcattatccctcctcttcgccagcgcactattgaaatcaggagtgagaaaatagcccctttggggtaaatgtttttgacgcaaatcaagcgcttgtcatttaaaaaatgacacaaatggcgcttgaccgcgtaattcccttagagatcaatttcctgccgttttacctgttgccagacttcttccattgtttcgaggtcaacacctgtcatttccagtccacgcgcggcaacaatacgctccacttcgcgaaaacgacgctcgaatttttcgttcgctttttgcaatgcgatttctgctttcgtccctaaatggcgagccagattaaccgtggcaaacagcaggtcccccatttcctcctccagtttagcctggtcgacaacagcctgccgcgcttcgtacatcacctcgtcgatctcttcgtagactttatcgactaccggaccaagcgtcgtccaatcgaagccaacgttggcgcaacgtttctggattttttgcgcacgcattaaagccggtaaactacgaggaatatcgtccagcgcgctatgctgcgctttctgcgcgcgctcttcggttttgatttgctcccaacgggcaagcacttcactactgttttcggcagaactatcagcaaaaacatgcggatggcgacgctctaatttatcgctaatagcagcgcaaatatcattaaagtcaaagcgcccttcttcctgagccatttgcgcgtaaaacaccacctggaatagcagatcgcccagttcaccgcgaagatcgtcaaaatcttcacgggcgatggcgtccagcacttcgtaggtttcttcaagggtgtaaggcgcaatggtggcaaatgtctgctctttatcccacgggcagccgttttccggatcgcgcaggcgctgcataatagtgagcaaacggtcgatttgattcattgaattgtcctgaaaattgcgggtctgtcaggtggaaacctgtgaccagaatagaagtgagttagtaacattacccaatcagtacgttaattttggctttaatgagttgtaattcctctggggcaactgttcctttcttcgttgctcctcttgcccgccaggcgatactttttacctgatcagctaacgctacgccatcacgttcctgaccggataaaacaacttcgaacggatatcctttactttgcgttgtacaaggaacacacagacacatacctgttttgttgttgtacatgaaaggactcaggacaacagctggacgatgtccagcttgctcgctaccttttgtcgggtcaaaatcaacccaaatcagatcgcccatatcgggtacgtatcggcttaccattaccagacttccttatctttcggctctccccagtcgatattctcgtggaggttttccggcgtgatgtcgttgaccagttcagcaagcgtaaatacgggctctttacgcactggctcaataattaatttgccatccaccaggtcaatcttcacttcatcatcaatattcagattgagcgcctgcattaacgtagccgggatccgcaccgccggactatttccccaacgctttacgctactgtggatcataaccctttcctcaaaccgctatcatatgtagatacagtatatatcaatctacattgtagatacgagcaaatttcggcttaactcccgtgcaaccgacgcgcgtcgataacatccggcacctggttgagtttacccagcacgcgccccagcacttgcaggttgtaaatctcaatggtcatgtcgatggtcgccagttgctgtttggtgtcgctacggctggcaacgccaagcacgttcaccttctcgttggcgagaatggtcgtgatatcacgtaacaacccactacgatcattagctaccacgcggaccaccaggctatatccggcggagtagctctcaccccataccgcgtcaacaatgcgttctggcgcatgggagcgcagttccgccagttgttcgcaatcggcgcggtgtacactaataccgcgcccctgggtaatgaagccgacaatctcatctccaggaatcggctggcagcagcgcgcgatgtggtgcatcaggttgccaacaccttcgactaccacgcgaccgttatctttactgcggttttgcggcgtgtagcttttttgctgaagttgcttcagcgcggcggcgtcctgctcttcggcactcggcttattaaattggctttgcaggaagttcaccatctgattgagacggatatccccgccaccaatcgccgccagcaactcgtcgacatcattgaagttgtaacgcggcagcagatgtttttctgcttctttcaggctgatccccagatgttccagctcgtcgtcaaggatttgccgcccagccagaatgtttttgtcacggtcctgtttacggaaccaggcgtgaattttgctacgcccacggctggttgtgacgtaaccgaggtttgggtttaaccagtcacggctggggttcggctgtttctgggtgataatttcaatctggtcgcccatctgcagctggtaggtgaacggcacaatgcgcccgccaatttttgccccgatgcagcggtgtccgacatcactgtggatgtggtaagcgaagtccagcggcgtacttcccgcaggcaaatcaacgacatcacctttcggcgtaaagacgtacacccggtcgtcaaagacctgactacgtacttcgtcgagcatttcgccggaatcagccatctcttcctgccacgcaatcagtttacgcagccaggcaatccggtcttcatgtccgctacgtgcgccgccagcagccgcgccctctttatatttccagtgcgcagcaacacccaactctgcatcttcatgcatctgtttggtgcggatttggatctcaacggtttttccacccggccccagaaccacggtatgaatagactgataaccgtttggtttcgggttagcgacgtaatcgtcaaactcatccggcaggtggcgatagtgagtgtgcactatccccagtgcggcatagcaatcctgtaaacgctcggcgacaatacgtaccgcacgcacatcaaacagctcatcaaaggcgaggttctttttctgcattttacgccagatgctgtagatgtgtttcggacgaccatacacttccgctttaacgccttcagctttcatctcagcgcgcagatgaccaacgaactcttcgatgtagtgttcgcggtcgagacgccgttcatgcagcagtttggcaattcgtttgtattcggttggatggaggtaacggaagcagtaatcttccagttcccatttcagttgtccgattccgagacggttagccagcggtgcgtagatgttggtacactcttttgccgccagtacacgttcatcttccggcgcatcttttacttcgcgcagatgagcaatacgctccgccagtttgatgactacgcagcgaaaatcatcgaccatcgccaataacatccggcgaacgttatcgacctgttcggaggaaacagaatcagtgtgcgtcgctttcagctggcggatcgccgccatatcacgcacgccgtgaataaggttaacgacgctcttaccgacgctctcacgcagcacatcttcgctgactacgttggcatccgccagagggaaaagcagcgccgcccgcagcgtgtcaatgtccatacttaatgtgctgaggatctccaccatctcaacaccacgccacaataacagactggcatccggatgcccctgcgtctgttgcagacaatacgcccaggtttcggctaagcactcacagctcttctggctggtaatacccagacttgcgatccatttttccggatcaaattcaccagccttattgatatgtgcacttcttaccgcaaccatcgtcctctcctttagggaccagacctgccgaaatcggcaaatcgcaattatttaacgcggctgaaaagtaccatgctttccagatgtcccgtgtgtgggaacatatccagcatcgccagtcgcgcaatggtatatcctgcttttaataacgcttcgctatcccgagccagcgttgcagggttacaggatacataaactatacgaataggttccagttttataatttgctgcataacacctgcggcacctgctcgcgccgggtccagcaacactttatcgaagccgtttttcgcccacggctgctttgtgacatcttcttcaagattttcgtgataaaacgtcacattctgtaagccattaagacgcgcattctgctggcctttttccaccagcgccggaacaccttctacaccgaccacactggcagcttgtgtcgccaatggcagtgtaaagttgcccataccgcagaacagatccagtacgcgatcttcaggttgcacatccagccattccaacgcacgcgctaccattttttggttcacacccgcattgacctgaataaaatcgcgcgggctaaaagttaagcgcaacccgttactgtcataccagggcatctcaccagagacggtttcgagtatctcactatcgggggcgagatacagatccaggccttcagaatggctaaagcgttccagtttttcgcgatctgcgctacttagcggtgcggtatggcgcaaaatcatcagcgtgccgctggttgcctgtaccagttcaacatgaccaagatggcgcatagcttgtaagctgcccagacatgccctgactttgggcagcaatgcttcaagttggggcgctaaaatggggcattgtttgacgtcgacaatgtcactggagcccgctttgcgaaaccccatctgaagttgctgtgttttcggtaagtagttcagacttaaacgcgcgcgacggcgatagccccagggaacatcggcgatcacttcagagacatcgtgtttcattaatcgggcgagtgccgcacttttgcttcgctgctgtaaatccacgctggcgtgttgttgctgacagccaccgcatacgccaaaatgaggacagcgtggcgtttcgcgttccgggctatcgcttaaccggcgtacgactttagcgcgggcatactgttttttatcttcagtaacagtaacttccgcgttttcctgcggcaataatccggggataaatagcgttttgccgttatgtcgcgccacgccctgaccaaaagagtcgaggtcgttgacactaacggttatgatctgacgcgtcgtcgtgcgtcgttttgcagagtagaattgcgccattggcgagactttctcaatttaacagtgtgaccttaattgtcccataacggaactccatgaccaactacagcctgcgcgcacgcatgatgattctgatcctggcaccgaccgtccttattggtttattgctgagtatctttttcgtcgtgcatcgctataacgacttgcagcgtcaactggaagatgccggtgccagcattattgagccgcttgcagtttctactgaatatggcatgagcctgcaaaatcgcgaatctatcggtcagttaataagcgtactgcatcgtcgccattccgatattgttcgcgcgattagcgtttatgatgaaaataaccgactctttgtcacctccaattttcatcttgatcccagtagtatgcagctcggcagcaacgtgccgtttcctcgccagctcactgtcactcgtgacggcgatattatgatcctccgcacgccgattatttctgagagttactcccccgacgaaagccccagtagcgatgccaaaaatagtcaaaatatgttgggatatattgcgctggagctggatcttaaaagcgttcgcttgcagcaatataaagagatctttatttccagcgtgatgatgctgttttgtatcggtattgcgcttatttttggctggcgcttaatgcgcgatgtaaccggtccgattcgcaacatggtgaataccgtcgaccgcatccgtcgcgggcaactcgacagccgggtggaaggatttatgctcggcgagctggatatgctgaaaaacggtatcaacagcatggcaatgagcctggctgcttatcacgaagagatgcagcacaatatcgaccaggcgacgtccgatctgcgtgaaacgctggagcagatggaaattcagaacgttgagttagatctggcgaaaaagcgcgcccaggaagcggcgcgtattaaatccgagtttctggcaaatatgagtcacgagctgcgtacaccactgaatggtgttattggctttacccgcctgacgctgaaaacagaattaacaccaacgcagcgcgatcacctgaatacgattgaacgtagcgcaaataatttgctggcaattattaatgatgttctcgacttcagcaaactggaagcaggtaagctgattctggaaagtattccattcccactacgcagcacgctggatgaagtcgttactctgctggcacattcttctcacgataaagggttagaactgacgctcaatattaaaagcgacgtgcctgataacgtgatcggcgacccgctgcgattacagcaaatcatcactaacctggtggggaatgcaattaaattcaccgagaatggcaacattgatattctggtagaaaaacgtgcgctgagtaataccaaagtgcagattgaagtgcagattcgggataccggcattggtattcctgaacgcgatcaaagccgcttattccaggccttccgacaggctgatgccagtatttcccgccgtcatggtggcaccgggctggggctggtgattacacaaaaactggttaatgaaatgggcggcgatattagcttccatagccagccgaatcgcggtagtactttctggttccacattaatctcgatctgaacccgaacattattatcgaagggccatccacccagtgcctcgcaggtaagcgcctggcctatgtcgaaccaaactccgcagcagcgcaatgcacgctggatattttaagtgaaacgccgctggaagtggtttatagcccaacgttctccgcgctgcctcccgcgcattacgacatgatgttgttaggcatcgcggtgaccttccgcgagccgctaacaatgcaacatgagcgattagcgaaagcggtaagcatgaccgatttcctgatgctggcacttccttgccatgcacaagtcaatgctgaaaaactcaagcaagatggtatcggcgcgtgtctgctgaaaccattaacacctacacgcctgttgcctgccctgacggaattttgtcatcacaaacaaaacacgcttttgcctgtaaccgatgaaagtaagctggcaatgacagtcatggcggttgatgacaaccccgctaacctgaaacttatcggcgcattgctggaagatatggtgcaacatgtggaactttgcgatagcgggcatcaggcggttgaacgggcgaaacagatgccgttcgatttgatcttaatggatattcaaatgccggacatggatggcattcgggcctgcgaactcatccaccaactcccgcatcagcaacaaacgccggttatcgcggtaacggcgcatgcaatggccgggcaaaaagagaagctgcttggcgcagggatgagcgattatctggcgaaaccgattgaagaagagcgattgcataatttgttgttgcgctacaagcctggcagcggtatttcctctcgcgtcgtgacgcccgaagtcaacgaaattgtggtgaacccgaatgcgaccctcgactggcaactggcactacgccaggcagcaggaaaaaccgatttagcgcgcgatatgctgcaaatgttactcgatttcctgcctgaagttcgcaacaaagttgaggaacagctggttggagaaaacccggaaggcctggttgatttgattcataaactgcatggcagttgcggctatagcggtgtgccacgtatgaagaatctctgccaactgatcgaacaacagctacgtagcggtactaaagaagaagatttggaaccggagctgctggaactgttggacgagatggataatgtcgcgcgcgaagccagcaaaattctcgggtaatggatgtcttgtcgagtagcaatcggctttttatgacgctggtttcagattggtgacaaagtgcctgtgtttatgccggatgcggcgttaacgccttatccggcctacaaaaccaattaaattcaatgaattaaaaaatgatgtagacctgatacatagcacaacaggctattttgcgtttagcatcagtctcaaaccggctccagatagagccggttttggttttctgtcttaacgcaccatgcacgggcgcttgttatcgaacgtccagccaggaatcagatactgcattcccatcgcatcgtcacgcgcgccaagcccgtgtttctgatacagctcatgggctttcatcacttgatccatatcgatttctacacccagccccggtttttctggcacctgtaccagcccgcctttgatctcaaacggttctttggtcaggcgctgattgccttcctgccaaatccagtgcgtatcaatagcagtaattttacccggtgcagcggcggcaacatgggtaaacatcgccagggaaatatcgaagtggttgttagagtgactaccccaggtcaggccaaattcatggcacatttgcgccacacgtacgctaccttgcattgtccagaaatgcggatccgccagcgggatatcaacggattgcagggagagcgtatggcccatttgccgccagtcggtggcgatcatattggttgcagtcggtagacctgtcgcgcgacggaactctgccatcacttcacgcccggagaaaccttgctccgcaccacacggatcttctgcataagccaggctacctttcaggtatttaccgattttaatcgcttcgttcaggctccaggcaccgttaggatcgagcgtaatacgcgcctgcgggaagcgttgcgccagtgccacaatagactcggcctcttcttccccggccagtacaccgcccttcagtttgaaatcgttgaagccatatttttcatatgccgcttccgccaggcgcaccaccgcatccggcgtcatcgcttcttcatgacgcaggcgataccagtcgcaactgtcatccggctggctttgatacggcagcggcgtggctttgcgattaccgacgaagaacagataaccgagcatttcgacttcgctacgctgttgaccatcgcccagcaggcttgccacgtttacccccagatgctgccccagcagatccagcattgccgcttctatcccggtaactacatgaatagtggtacgtaggtcaaatgtctgcaaaccgcgcccaccagcatcacgatcggcaaaagtattacgcaccagcgtcagaacgtttttgtattcacccagcgttttacctaccaccagcggaatcgcatcttccagcgttttacggattttctcgccgccgggaatttcccctacgccagtgtgaccagaattatctttgataatcacaatattacgcgtaaagaacggtgcgtgtgcaccactcagattcatcagcatactgtcatgacccgccaccgggataacctgcatttcagtaacaacaggcgtcgtaaattgagaactcatatttatgtcctttttcagaatcaatgacggccgaaaacgggacgtttacggtcaaaggtccagccggggatcaggtactgcatcggacctgcgtcgttacgcgcaccgccaggcagacgtttataggcctcatgtgccttttgtacctgttcccagtccagttccacgcccagaccgggcgcatcaggaacggcaatttttccgtttttaatctccagcggattttgggtcaggcgacaatcgccctcctgccaaatccagtgggtatcgatagcggtaggattacccggtgccgccgcgcccacatgggtaaacatcgccagagagatatcgaaatggttattagaatggcagccccaggtcagcccccagtcgtcgcaaagctgcgccacacggactgcaccggaaagcgtccagaagtgcggatcggcaagtggaatatctaccgcattgagcatcaccgcatgacccatttcgcgccagttggtggcgatcatgttagtcgcgacgggcaagccggtcgcccgtcgaaattccgccatcacttcacgtccggagaagccctgttctgcgccgcatggatcttcggcataggtaagaacatcattcagccctttgcataaagaaatggcttcatcaagcagccatgcaccgttgggatcaacggtaatccgcgcatccgggaagcgtttcttcaatgcacgaacagtgtcgatttcttgctcgccaggtaacacgccgcccttaagtttgaaatctttaaagccgtagcgatcctgactggcttccgccagacgcacaacggcttcgctgttcattgctttctgatgccgcaactgataccactcatggttgcccggcgtattttccacataaggaagatcggttttggtccgatcaccgatataaaacagataaccgaggacggtaatagcctcgcgttgcttgcctggccctaacagttcgcagaccggaacattcagcgccttacctagcaggtcaagcaaagcggcttccagcgccgccacggcgttaacgcgtaattcaaaggtccaggcacctttaccgaaggtatcaaaatcggcggcctgattacctttatgcacctgctggaccactttattcagtcgcgcaacttcctggcccagaaccatcggaatagcatcgacaagcgtctgataaatcacatctccgcccggcgcttcaccaatgccggtatgcccggcgttatcggtgagtaccacaatattgcgggtgaaatatgcgttatgtgccccaccaatattaagcaacatgctgtcatgcccggccaccggaatgactttcatatcagtaataacaggactggattgtgtcgccatcttattgccccgcaacaggtttcaactcgatacgcttgatatcgcccaccagcaccaggtagctcagtaccgcgattaaggcatgaacaccaacataaatcagcgccccattaaagctgccagtcgtgccaacgatataaccaattgcgattggcgtgacgatgccagaaatgttaccgaacatgttgaacaggccaccggaaagaccgctgatctcttttggcgcggtatctgccattactgcccaacccagcgccccgatgcccttaccgaagaaggccagcgccataaagccgatgatcatccactcaacgttgacgtagttgcagaacaccatcaccatgctcagcaacatgcccattacgatcggtgttttacgcgcaatgttcaggcttcccgtgcggcgcatcagccagtcggaaataatcccacccagcacaccgccgataaaaccgcaaaccgccggaacggaagccacaaagcccgctttcagaatgctcatcccgcgtgcctgcaccagataaaccgggaaccaggtaataaagaagtaagtcagggcgttgatacagtactgaccgatataaacgccgatcatcatccgactccctagcagctgtttgatctgcccccacttcacgctgaacggcactttaactttggtgttttgctgatccatattgatcagcgcaccacccgcggcgatgtactccagctctttcttatttacccccggatgttgatttggctcgtggatgactttcaaccagataaagctgatgacaatccccagaccgcccataaagaagaagacgtgactccagcccacttcatgcgtcagccagcccataatcggcgcgaagatcaccgttgcgaagtattgagcggagttaaaaatgctcaccgccgttcccctttcctgcgccggaaaccaggccgcaacaatgcgactgttgccggggaaagatggcgcttcagcaagcccgaccaggaagcgcagcgtaaacagggcaacgataatgccgaatccactaaagatatcgacgaagccttgcagcaaggtaaacatgctccagataaagatgctccagaagtagacgcgtttactaccaaaacggtccagcaaccagccaccagggatctgcccgataacataagcccaactgaaagcagagaacacatagcccattcccacgggatcaaggccgatatctttggccatttcgctaccggcgatagagagcgtagcgcggtcgccgtagttgaaggatgtgacgataaacaacatcaccactatccagtaacgagcatttgtgcgtttttccacactgctcgcagcctgacttaaagaactcattgttgcactcctgaaaattcgcgttagccacgctcactctggactgcgacatcgccaggaaatcagaggtgacgtagggtgttttttgccgtttttataggtcgttcgccgaatacggcgcgtgtttatatctggcaatagcagtataaaaagcgcgccatagcggctcaccgtgcaacaacacaacattaatgcgttcaatgaggcccgattttggcattagccctggacggtggaatccacttcacggaaatgaaaacaagaacaagaaaggaagggttaaaacgaagaaataaagaagagtatgaaatggatcgcttgactccaggcaaacgccagtaaaaatccgcgctatgaagcagtttttactggcatttgcctgaaaagattcgattcagcaccgctaaaacgacatttaccgctcgctgaacatatcaggacaacagcgtgccccactgttcgacccacggattactttccgtttccggttccgggttctcactggcgtcaatcaacagcatttcgccaacccgctgagcgctctgttcctgcaacaaggcatcgaactgtttgccgccattgcagaaattcacataactactgtcgccgagcgcaatcacgccataacgcagattcggctggaagcccagactatctttgattccctgaaagagtggcacaatgctatcaggaaggtcgccctgcccggtcgtggacgtaaccaccagaacatacttatcctgatagggcagccagtcgcttaattcaggatcttcaaataccgttgctttgtggccctgcgcggtcagaatcgcttccgcttcttcggccactaacagactattcccgtacatggtgccgacaaaaataccaatttccgccataccgttttctccctggattaggaacttatctctccatcctgaccgcttggcgcactgaactcaaccctttcattttcaggaagcagaccgcgccagccaaattgacttaacgcctgcatccaggtgtcgtccaggcccgcgtgaatagtcagcggctcgccagtaaaaggatgcgtcaaactcaactgactggcatgtagcattaaccgctggaggccaaaatgctcagcaccgctgcgattctggcgtaaatcgccatgtttgctatcgccaataatcggatgacgcaaatgggcaagatgtcggcgaagctgatgtttgcgtccggttttcggctccagttccaccaggccgtagcgcgtggtcgggtaacgtccggtcgctaccggcatttctacggtcgccagaccgcgataatgcgtcactgctggctgcgggcctttatcttcgcgggcaaatttatcagcgattttgtccagttcttccaccagtggataatccagcaccgcttcttccatcaaccagccgcgcacaatcgcatggtaacgtttctggatttggtgctgttcaaactgttgtgccagcagccgtccggcctcgctggataatcccatcaacaacacaccagaagtgggtcggtccagacgatgagcagtaaaaacatgctggcctatctggtcacgcacggtttgcatgaccactactttctcgtcgcgatccagccagctgcggtgaaccagccagccggagggtttatttaccgcaaccagccattcatcctgatagagtatttccagcattagctcgcatcatccgcaaaaagagcatccagtttttccagctcagccagaataagcgcgcgttgcggatggtccgtcgccagcgccatttcataatagggtgcaacggcaaaagcgcccggtaacggctgtttgttatctaacaaatcgtgcattcgcgggatcagcacccactgcaaccactccagtggttccatggtgtccataaagaacggttgggtactattaaattgatgcggctggggttcatcgtttcgccagtgctgatgttcacgcagtaacgcttcaagcgcctgcaactggagacgaacgcggtcatgagtggtcataaagcaacctcaataagaaaaactgccgcgaaggatagcaggaataaaaaaagggagcactgtattcacagcgctcccggttcgtttcgcagcattccagctacttttgttgctccctgctcatccttgacaacttttcctctggccttgcggccaatcgttcatcctgaactattgcttcctgctcacaccaccccgatgtgatacttcatcctgaagtgtccctggccttcctgacccaccgaatcatcctgaccggttctcattctccatcctggaggtgtcctttaacgcgtcctgcgtcatcctcttcgcttcatccagaagcctttccctgaaacaccatcctggtgtgtcctgcagaagtgtcatcatcctgatgttcacttcgttgtctgactccctgtcgacgaagatagaatcgtctttttcgcgaagtcttacaaggcgcttacagacaatgccttaaggaaaatttcatatgaaagttaagaattaacaatcaacattttgattttaaatgaaaataacgattcttatctttttaagtattcgcttatttcctggcgatctcctacagagtctgtaagagatctctcacaaccagatggggtatttggattacagaagaggcttaagttgattaaggaattccgcaagattactggctaaatgcgtccgtttacgtgttcccagcgtctctttgcacacttcaccggagagattacacacgctgatgacctctaactcttcttccagcgtcgcgataaatagtgtgggcggcagttttagccttttctgagtcaccagatgaccaatcagattttcctgcacccgacggaagtcgtcttcactccaggtttgcagcaatgtcagtttgatatcgccaaactgcgcgtgcatatccccggcaaactgagtcgtataaaaggtatgaattgtgggttgtatcacaatatcaaaagcgcgttcaaccgcgtttacattttgttccccggtaaacggctggggttgccagtatacggcatcttcggtagtactaataatgcacggactaggaacaccgtacagttcctcacttaacggccagcttttatgctcttcatgccacgcatcgcagtagcgtgcagtaaaatctttcagggcttgtgcggtcaaatcgtccactaatttctctcttcacttaaaccagatacacttgtcgtttagtttatctggtttatgacggtgaaacatgtcttcttatgcaaaccatcaggcacttgcgggcctgactcttggaaaaagtaccgattaccgggatacctatgacgccagcctactgcaaggcgttccacgcagcctgaatcgcgacccgctgggtctgaaagcggataacctgccttttcacggtacggatatctggacgctgtatgaactttcctggctgaatgcgaaaggtttgccgcaggtcgctgtcggtcatgttgaacttgattacaccagcgtaaatctgattgagagcaagagttttaagctctatctcaacagttttaaccagacgcgttttaataactgggatgaggtgcgccagacgctggagcgcgacttaagcacttgcgctcagggtaagattagcgtggcgttatatcgtcttgatgaactggaaggccagccgataggtcattttaatggcacttgcattgatgaccaggatatcactatcgataactatgaattcactactgactatctggagaatgccacctgtggtgaaaaagtagtggaagagacgcttgtcagccacctgctgaaaagtaactgcctgatcacccatcaaccagattggggtagcctccaaattcagtatcgtggacgccaaattgacagagaaaaactgctgcgttacctggtcagtttccgtcatcacaacgagttccacgaacagtgcgtggaacgcatctttaatgacctgttacgcttctgccagccagaaaaattgagcgtttacgcacgttatacccgtcgtggcggtctggacattaacccgtggcgcagtaatagcgattttgtcccaagcaccacaagactggttcggcaataaatttttctcaattttgcgtgctggattcacgcagaaggttgtgaaaggtcatcaggcagggctattgtaatcaaagggaatgacgatattcgtcccataaggagtttttcttgattacacatattagcccgcttggctccatggatatgttgagccagctggaagtggatatgcttaaacgcaccgccagcagcgacctctatcaactgtttcgcaactgtagtcttgccgtactgaactccggtagtttgaccgataacagcaaagaattgctgtctcgttttgaaaatttcgatattaacgtcttgcgccgtgaacgcggcgtaaagctggaactgattaatcccccggaagaggcttttgtcgatgggcgaattattcgcgctttgcaggccaacttgttcgcggtcctgcgtgacattctcttcgtttacgggcaaatccataacaccgttcgttttcccaacctgaatctcgacaactccgtccacatcactaacctggtcttttccatcttgcgtaacgctcgcgcgctgcatgtgggtgaagcgccaaatatggtggtctgctggggcggtcacagtattaacgaaaacgagtatttgtatgcccgtcgcgtcggaaaccagctgggcctgcgtgagctgaatatctgcaccggctgtggtccgggagcgatggaagcgccgatgaaaggtgctgcggtcggacacgcgcagcagcgttacaaagacagtcgttttattggtatgacagagccgagcattatcgccgctgaaccgcctaacccgctggtcaacgaattgatcatcatgccagatatcgaaaaacgtctggaagcgtttgtccgtatcgctcacggtatcattatcttccctggcggtgtgggtacggcagaagagttgctctatttgctgggaattttaatgaacccggccaacaaagatcaggttttaccattgatcctcaccggcccgaaagagagcgccgactacttccgcgtactggacgagtttgtcgtgcatacgctgggtgaaaacgcgcgccgccattaccgcatcatcattgatgacgccgctgaagtcgctcgtcagatgaaaaaaagcatgccgctggtgaaagaaaatcgccgtgatacaggcgatgcctacagctttaactggagtatgcgcattgcgccagatttgcaaatgccgtttgagccgtctcacgagaatatggctaatctgaagctttacccggatcaacctgttgaagtgctggctgccgacctgcgccgtgcgttctccggtattgtggcgggtaacgtaaaagaagtcggtattcgcgccattgaagagtttggtccttacaaaatcaacggcgataaagagattatgcgtcgtatggacgacctgctacagggttttgttgcccagcatcgtatgaagttgccaggcagtgcctacatcccttgctacgaaatctgcacgtaatctccgctcccccggtgacgtttgttgccgggttttctcgtttttggtcacttactcatcaactcatttcatttgttatatgaatgtttcttaccaccctcacgcgacaaatatcatcacagttaatatgtcatacaatttatgttgcaacgcaaacgtttccctattttcataaaccgtattttatcgctatgaaaaagaaattatcgccatgattaactaaaagtattgattttttcagttcaacctacatatattgcgcgccccggaagaagtcagatgtcgtttaatgggcaaatattgcccttaaattctcttttacttttgatttacagagtaaagcgttgggataatctatcttccaagtagattattgtatttgagatcaagatcactgatagatacataacttgtgtgtatctttccgccctcaaattattacggcggtaaatgattaagccatcgccgatagacagatttcatttttacggtcaggcaccttcccgggctgaactggctaaaagctgaattatttgcattcctccaggagaaatagatggaaacgactcaaaccagcacgattgcgagcaaagactctcgtagtgcctggcgcaagacagacaccatgtggatgctgggcctttacggcacggcaatcggcgcgggcgtgctgttcctgccaatcaacgccggtgttggcggtatgatcccgctgatcatcatggctatccttgcgttcccgatgacgttttttgctcaccgcggcctgactcgcttcgtactgtctggtaaaaacccgggcgaagacatcaccgaggttgtagaagaacactttggtattggcgcaggtaaactgattaccctgctctacttcttcgctatctacccgatcctgctggtttatagcgtggcaatcaccaataccgttgaaagcttcatgtctcaccagctgggtatgacgccaccgccgcgtgcgattctgagcctgatcctgatcgtgggtatgatgaccatcgttcgcttcggtgagcagatgatcgttaaagcgatgagtattctggtattcccgtttgttggcgtactgatgctgctggctctgtacctgatcccgcagtggaacggcgctgcactggaaacgctgtctctggacactgcatctgcaaccggaaacggtctgtggatgaccctgtggctggcaattccggtaatggtgttcagcttcaaccactctccgatcatctcttctttcgccgttgcgaagcgtgaagagtacggcgatatggcagaacagaaatgcagcaagatcctggcattcgcacacatcatgatggtgctgaccgtaatgttcttcgtcttcagctgtgtactgagcctgactccggcagacctggctgcggctaaagagcagaacatcagcattctgtcttacctggctaaccactttaacgcaccggttatcgcgtggatggctccgattatcgcgattatcgctatcaccaaatccttcctcggtcactacctgggcgcacgtgaaggcttcaacggtatggtgattaaatctctgcgtggtaaaggtaagtctatcgaaatcaacaagctgaaccgtatcactgcgctgttcatgctggtaacgacctggattgttgccaccctgaacccgagcatcctgggtatgattgaaaccctgggcggtccaatcatcgcgatgatcctgttcctgatgccgatgtacgcaattcagaaagtaccggcaatgcgtaagtacagcggtcacatcagcaacgtattcgttgtcgtgatgggtctgattgcaatctccgcaatcttctactctctgttcagctaagtcctttcgcgccgctttcgggcggcgcttcctccgttttaacgcgatgtatttcctatgattagcgtattcgatattttcaaaatcggcattggcccttccagttctcataccgttggaccaatgaaagcgggtaaacaatttaccgacgatctgattgcccgtaacctgcttaaagacgtgacccgcgtggtggttgacgtgtacggcagcctctctctgaccggtaaaggccaccacactgatatcgccattattatgggcctggcgggtaacctgccggataccgtggatatcgattccatccccagttttattcaggatgtgaatactcatggtcgcctgatgctggcaaacggtcagcatgaagtggagttcccggttgatcagtgcatgaacttccacgccgacaacctttctctgcatgaaaacggtatgcgcattaccgcgctggcgggcgataaagtcgtttacagccagacttactactctattggcggtggctttatcgttgatgaagagcattttggccagcaggatagcgcaccggttgaagttccttatccgtacagtagtgcagccgatctgcaaaaacattgtcaggaaaccgggctgagtctctctggcctgatgatgaaaaacgagctggcgctgcacagcaaagaagagctggaacagcacctggcgaacgtctgggaagtcatgcgcggcggtattgagcgcggtatttccaccgaaggcgtgttgcctggcaaactgcgcgttccacgccgtgctgcggcactacgccggatgctggtcagccaggataaaaccaccactgacccgatggcggttgttgactggatcaacatgtttgcactggcagtgaacgaagagaacgctgctggcggtcgcgtggtgactgcgccgactaacggtgcgtgcgggattatcccggcagttctggcgtactacgacaagtttatccgcgaagtgaacgctaacagtctggctcgttacctgctggtagccagcgccattggttctctttataagatgaacgcgagcatttctggtgctgaagtgggttgccagggtgaagttggcgtggcgtgcagtatggcggcggctggtctggcagaactattaggcgcaagcccggcgcaggtgtgcatcgcggcggaaatcgccatggagcacaacctcggtctgacgtgtgacccggtcgccggacaggtacaggtgccatgcatcgagcgtaacgccattgcggcagtaaaagcggtgaacgccgcacgtatggcgctgcgccgtaccagcgagccgcgcgtctgcctcgataaagttatcgaaaccatgtacgaaacaggtaaagatatgaacgccaagtaccgcgaaacctctcgcggcggcctggcaatgaagatcgttgcctgcgattaatcgctctccaaaggcctcgttttgcgaggcctcttcccgatttctcatccagccgtagcctgttccggcatcgaatgttacccttatcgcctgatctttaagggggttatcgtggctgttcatttgcttattgtcgatgcactgaatcttattcgtcgcattcatgccgttcaggggagcccctgtgtcgaaacctgccagcatgcgctcgatcagctcattatgcacagccagccaacccacgcggtcgccgtttttgatgatgaaaaccgcagtagcggctggcgtcatcagcgtttaccagattacaaagcgggtcgaccgccaatgccggaagagttgcacgacgagatgcctgcattacgcgccgcctttgagcaacgcggcgtcccgtgctggagtaccagcggcaacgaagccgatgacttagccgccacgctggcggtcaaagtgacacaggccgggcatcaggcaacgattgttagcacagataaaggctactgtcagttacttagtccgacattacgtattcgtgattacttccagaaacgttggctggatgcgccatttatcgataaagaatttggcgttcaaccgcagcagttgcccgattactggggacttgcggggatcagcagtagtaaggtaccgggtgttgcgggaatcggaccaaaaagcgccacgcagctgctggtcgagtttcagagtctggaagggatatatgagaatctggatgcggttgccgaaaagtggcgcaaaaaattagaaacccataaagagatggcgtttctgtgccgcgatattgcccgcttacaaaccgatttgcatatcgacggcaatttacagcaattgcggttggtacggtaacggcgagccggatacgccgcaaacgtcgtatccggcattatcacatcagcgcatttaccaggcggtatggtaaagctctacaatatcctcaagcgttgcttcacgcgggttgccaccggtacaaacatcatccagtgccgcctgcgccagtgccggaatgtcttccttgcgtacaccaacatcacgcaaatgtggcggaataccgacatcacggttgagagcaaacaccgcttcaacagcggcattacgcgcctcttccaggctcataccttccactttcacgcccataacgcgcgcgatatcgcggtacttctcaccggtaaagtcagcgttataacgcatgacatgcggtaacaggatggcgttcgcaacaccgtgtggagtgttataaaacgcgcccagtggatgcgccataccatgcaccaaccctaacccaacattgctgaagcccatacccgcaacatactgcccgagcgccatttcttctccggcatccttatcaccagcaacgcttcctcgcagcgccccagcaatgatttcaatcgctttaatgtgcagtgcatcggttagcgcccacgcgccacgggtaatatacccctcaatagcatgagtgagcgcatcgacacccgtcgcagctttcagcgctggaggcataccatccatcatgtcagcgtcaataaacgccacctgcgggatatcatgcggatcaacgcaaacaaacttgcgccgtttctcttcgtcagtgatcacgtagttaatggtcacttctgccgcagtacctgctgtggtaggaattgccagaatcggtacactgggtttattggtcggggaaagcccttccaggctacgcacatcggcaaactccgggttgttgctgataatgccaatcgctttacaagtatcctgtggagaaccaccaccaatagcgatcaggtaatccgcgccgctattctggaatacaccgagcccttctttgacgacagtaattgttgggttgggcactacgccgtcgtaaatcgcccatgccagccctgcagcatccatcttatcggtcactttcgccaccacgccgcattgcaccagcgttttatcggtgacgatcagcgccttctgataaccacggcgtttcacctcatcggttaaagccccaacagcaccccgaccaaaccatgccgtttcgttcagaatcattctgttagccatcatccttctccttgttgctttacgaaattactcttcaattcgtaacccataggttttgaatttctccagcactacggcaatctcttcatcgctcagcactggcaccgggtccgtaatcgccagggtcgtcaggtaaagttgcgccagcacttcaacttcatgcgccagccataacgctttttccagattcacctcacaagcgataagcccatgatgttgtaacaaagttgccttacgatttttgagagccagcgcaacatgttcagaaagttcgcgtgttccaaaggtcgcataaggcgcgcaaggaatagaattaccgccagccgccgcaatcatgtagtgaatagcggggatgcttcggttaagaatggaaactgccgtgcaatgaacggcatgattgtgaacaaccgcgttggcatccggtctgctttgataggctgccatatggaaacgccattcgctactggggagctttccttcctcatgtttaccgttgccatcaataaagacaatatggctctccgtcagtttttcatatggaatgcctgtaggcgtaatcagcatcccatcctgataacgtacactgacgttccccgctgtcccctggttcagtcccaggcgggtcatttccaggcaagtgtcaataatctgacgagcaagtttatttcgttccattagctacctctctctgattcaaaacagggcaataatgttgttcctttcacactattgaattagccgtttaattacccaccatcttcttcctgattaacaagaaagaaattcacaagcttatattttgtgacctggttcaactaatcacagtaaataactgcaagttctctttttataaccccattaaaaatgaccgctcttaaaaatatttatcaaaacggtcatttttctattcctccaagcccggaatgaccgttttcggcacaaacaattaatacggtcatctgatttgtgttttttatgatttattttctgaaacgggcatgaaatttcgattattaaagtgatggtagtcacataaagtcaccttctagctaataagtgtgaccgccgtcatattacagagcgttttttatttgaaaatgaatccatgagttcatttcagacaggcaaatattcactgatatgaagcccgaactcgctggttttgcacttttgaaaacataaccgattacgtgcttaagcttctgaacctaagaggatgctatgggaaacacaagtatacaaacgcagagttaccgtgcggtagataaagatgcagggcaaagcagaagttacattattccattcgcgctgctgtgcagtctgttttttctttgggcggtagccaataaccttaacgacattttattacctcaattccagcaggcttttacgctgacaaatttccaggctggcctgatccaaagcgccttttactttggttatttcattatcccaatccctgctgggatattgatgaaaaaactcagttataaagcagggattattaccgggttatttttatatgccttgggtgctgcattattctggcccgccgcagaaataatgaactacaccttgtttttagttggcctatttattattgcagccggattaggttgtctggaaactgccgcaaacccttttgttacggtattagggccggaaagtagtggtcacttccgcttaaatcttgcgcaaacatttaacagctttggcgcaattatcgcggttgtctttgggcaaagtcttattttgtctaacgtgccacatcaaagccaagacattctcgataaaatgtctccagagcaattgagtgcgtataaacacagcctggtattaagcgtacagacaccttatatgatcatcgtggctatcgtgttactggtcgccctgctgatcatgctgacgaaattcccggcattgcagagtgataatcacagtgacgccaaacaaggaagcttctccgcaagcctttctcgcctggcgcgtattcgccactggcgctgggcggtattagcgcaattctgctatgtcggcgcacaaacggcctgctggagctatttgattcgctacgctgtagaagaaattccaggtatgactgcaggctttgccgctaactatttaaccggaaccatggtgtgcttctttattggtcgtttcaccggtacctggctcatcagtcgcttcgcaccacacaaagtcctggccgcctacgcattaatcgctatggcactgtgcctgatcagtgccttcgctggcggtcatgtgggcttaatagccctgactttatgcagcgcctttatgagcattcagtacccaacaatcttcagcctgggcattaagaatctcggccaggacaccaaatatggtagctccttcatcgttatgaccattattggcggcggtattgtcactccggtcatgggttttgtcagtgacgcggcgggcaacatccccactgctgaactgatccccgcactctgcttcgcggtcatctttatctttgcccgtttccgttctcaaacggcaactaactgaacatattttccgaataaagtgaggaatctgtaatgaaaaaaatcagcttaccgaaaattggtatccgcccggttattgacggtcgtcgcatgggtgttcgtgagagccttgaagaacaaacaatgaatatggcgaaagctacggccgcactgctgaccgagaaactgcgccatgcctgcggagctgccgtcgagtgtgtcatttccgatacctgtatcgcgggtatggctgaagccgctgcttgcgaagaaaaattcagcagtcagaatgtaggcctcaccattacggtaacgccttgctggtgctatggcagtgaaaccatcgacatggatccaacccgcccgaaggccatttggggctttaacggcactgaacgccccggcgctgtttacctggcagcggctctggcagctcacagccagaaaggcatcccagcattctccatttacggtcatgacgttcaggatgccgatgacacaagcattcctgccgatgttgaagaaaaactgctgcgctttgcccgcgccggtttggccgtcgccagcatgaaaggtaaaagctatctgagcctgggcggcgttagcatgggtatcgccggttccattgttgatcacaacttctttgaatcctggctgggaatgaaagtccaggcggtggatatgaccgaactgcgtcgccgtatcgatcagaagatttacgacgaagccgaattggaaatggcactggcctgggctgataaaaacttccgctatggcgaagatgaaaataacaaacagtatcaacgtaatgccgagcaaagccgcgcagttctgcgcgaaagtttactgatggcgatgtgtatccgcgacatgatgcaaggcaacagcaaactggccgatattggtcgcgtggaagaaagtcttggctacaacgccatcgctgcgggcttccaggggcaacgtcactggaccgatcaatatcccaatggtgacaccgccgaagcgatcctcaacagtagttttgactggaatggcgtgcgcgaaccctttgtcgtggcgaccgaaaacgacagtcttaacggcgtggcaatgctaatgggtcaccagctcaccggcaccgctcaggtatttgccgatgtgcgtacctactggagtccagaagcaattgagcgtgtaacggggcataaactggatggactggcagaacacggcatcatccatttgatcaactccggttctgctgcgctggacggttcctgtaaacaacgcgacagcgaaggtaacccgacgatgaagccacactgggaaatctctcagcaagaggctgacgcttgcctcgccgctaccgaatggtgcccggcgatccacgaatacttccgtggcggcggttactcttcccgcttccttaccgaaggcggcgtcccgttcaccatgactcgtgtcaacatcatcaaaggcctgggaccggtactgcaaatcgcggaaggctggagcgtggaattgccgaaggatgtgcatgacatcctcaacaaacgcaccaacagtacctggccaaccacctggtttgcaccgcgcctcaccggtaaagggccgtttacggatgtgtacagcgtaatggcgaactggggcgctaaccatggggttctgaccatcggccacgttggcgcagactttatcactctcgcctccatgctgcgtatcccggtatgtatgcacaacgttgaagagaccaaagtgtatcgtccttctgcctgggctgcgcacggcatggatattgaaggccaggattaccgcgcttgccagaactacggtccgttgtacaagcgttaatacattactccctgatgtgatgcccggtcgctccggctaccgggcctgaacaagcaagagtggttagccggataagcaatgttatccggctatattgcaggagcgattatgaaacaagaagttatcctggtactcgactgtggcgcgaccaatgtcagggccatcgcggttaatcggcagggcaaaattgttgcccgcgccagtacgcctaatgccagcgatatcgcgatggaaaacaacacctggcaccagtggtctttagacgccattttgcaacgctttgctgattgctgtcggcaaatcaatagtgaactgactgaatgccacatccgcggtatcgccgtcaccacctttggtgtggatggcgctctggtagataagcaaggcaatctgctctatccgattattagctggaaatgtccgcgaacagcagcggttatggacaatattgaacggttaatctccgcacagcggttgcaggctatttctggcgtcggagcctttagtttcaatacgttatataagttggtgtggttgaaagaaaatcatccacaactgctggaacgcgcgcacgcctggctctttattagcagcctgattaaccaccgtttaaccggcgaattcactactgatatcacgatggccggaaccagccagatgctggatatccagcaacgcgatttcagtccgcaaattttacaagccaccggtattccacgccgactcttccctcgtctggtggaagcgggtgaacagattggtacgctacagaacagcgccgcagcaatgctcggcttacccgttggcataccggtgatttccgcaggtcacgatacccagttcgccctttttggcgctggtgctgaacaaaatgaacccgtgctctcttccggtacatgggaaattttaatggttcgcagcgcccaggttgatactagcctgttaagtcagtacgccggttccacctgcgaactggatagccaggcagggttgtataacccaggtatgcaatggctggcatccggcgtgctggaatgggtgagaaaactgttctggacggctgaaacaccctggcaaatgttgattgaagaagctcgtctgatcgcgcctggcgcggatggcgtaaaaatgcagtgtgatttattgagctgtcagaacgctggctggcaaggagtgacgcttaataccacgcgggggcatttctatcgcgcggcgctggaagggttaactgcgcaattacagcgcaatctacagatgctggaaaaaatcgggcactttaaggcctctgaattattgttagtcggtggaggaagtcgcaacacattgtggaatcagattaaagccaatatgcttgatattccggtaaaagttctcgacgacgccgaaacgaccgtcgcaggagctgcgctgttcggttggtatggcgtaggggaatttaacagcccggaagaagcccgcgcacagattcattatcagtaccgttatttctacccgcaaactgaacctgaatttatagaggaagtgtgaaatgctgaaaacaattagcccgttaatttctcccgaactattgaaagtgctggcagagatgggacatggagatgaaattattttttccgatgctcactttcccgcccatagcatgggaccgcaggtgatccgcgctgatggcctgttggtgagcgacttgctccaggcgattatcccgttatttgaactggacagttatgcaccgccgctggtgatgatggcggcggtagaaggtgacactctcgatcctgaagtagaacgacgttaccgtaatgcgcttagtctacaagccccgtgtcctgacatcatccgcatcaatcgttttgcgttttatgaacgggcgcaaaaagcctttgcgatcgttatcacaggcgaacgagcgaagtacgggaatattcttttaaaaaaaggggtaacaccgtaatctcataccggtacgcccgcatgacgcgggcggttatcgaatgatggggtgaaaaatatgaaagcggcacgccagcaagcgatagtcgacctgctgctgaaccataccagcctgaccacggaagctctctctgaacagctaaaggtcagtaaagaaaccattcgtcgcgatctcaatgaattacagacgcagggtaaaattctgcgcaatcatggacgcgctaaatatatccaccgtcaaaatcaagacagtggcgatccctttcacatcaggctgaaaagccattatgcgcataaagcagatatcgcgcgcgaggcgctcgcgtggattgaagaagggatggtgatagccttagacgccagtagtacttgctggtatctggcacgccagttgcctgacatcaacattcaggtcttcaccaatagccatccgatttgccatgaactcggtaaacgcgaacgcattcaactgatcagttccggcggcacacttgagcgcaaatatggctgttacgtcaatcccagcctgatttcccaacttaaaagcctggaaatcgatctgtttattttttcttgtgaagggatcgatagcagcggcgcactgtgggactccaatgcgatcaacgctgattacaaaagcatgctattaaaacgtgccgcgcaaagcttgttattgattgataaaagtaaatttaatcgtagtggggaagcccgcatcgggcatctggatgaggtaacgcacattatttctgatgagcgccaggttgcaacttctttggtaacagcctgacggaaagggtagcaggccggagacgacgccccggccttgcctgttatcgctcgtcgcgacgaccacccaccgcagcccagatgcggcggacgtgcaccgtcacttcttcgcgatcgtgatacaactgccgcgcctgaatctgagcatttatgccatgttcatcaagctgtgcctgaatatacgccagattgtgactcacttcttcgtagcgttttttcatcggcagtttgaggttgaaaatggtttcacggcaccagccattaaccagccactgtgccatcaatgccgcaactttcgccggtttttcaaccatatcgcataccatccaggagatattgctgcgcgtcggacggaatttgaaaccgtcttcccgcagccacgtcacctgtccggtatccatcagactttgcgccatcgggccgttgtcgacggaataaacccacatgttgcgcttcaccagttggtaggtccagccgccagggcaagcgcctaaatccaccgcccacatcccgttcgccaggcgttcatcccactcatccgcaggaataaacacatgaaatgcctcttccagtttgagcgtggaacgactcggcgcatctgccggaaatttcaggcgcggaatgcccatatagaacgggctattattgttgctgtaactgtaaccggtatagcagcagcctggtgcaataaagaatacatgcacaaccggacgcttcggcgtttcatagttcgccagcaccccggcatcgcgcaaggcagcgcgtagcggaacagtaaatttacggcagaatttcagtaactctttgctttcgttggtatcggcaacttcaacacgcagttcaccgcccttctctactacgccctgtaacatgccgacaatgggggtaatacgatcttctggcggcaaatgctgcaggagttcccccaccacaaaccactggcgggcaaaaattaaactactgaacggcagctcacggattaacttatcgccatcatcaggttgataacattcataaatgacataacccgcattctctttcacgcgggcaaaaccgaaaatttcccgctggccggctttatcggtaatttctgcggcgcactctttttcaaagcccggacggcacagcaatacaaccttattcatgacttacgcccttgcgctttaaacggatagcaccaactaacattaacgcccagcccgcgaggaagctcacgccgccaaccggagtgacaaacgcccacaaacgcagatgggacagcgccaggcaataaaggctgccgctgaacaacaccgtgcctaacgcgaggaaaacgctactccagtaaaaccagatactgatgcgacgctgcattgccaccgccagacctaagatcgccagcgtatgaaacgcctggtattcgaggccggtctggatccagcccatctcaacggcccccatggttttacttaacacatgcgcgccaaaagcgcccagagccacaaaaatgaagccgctaatggcggcgaaaatcagcataaaacggctggtcatggtcgtaccctacgtaaattattgttcataacgaaagcggaatttttcttgttcagcagcggctttcgccaggatccattggcgaaaggcggctattttacccagttctgcctgactgtcatgacaaaccagataaaaagcatttttactgaccagaacatcattaaacgggcaaacaagacgtccggcctcgatttcagattgcgccatcacgttatttgccagcgccactccctgcccgtggatagccgcttgcagcaccatggcgctatggctaaaaattggcccttgctgaacgttgatatgatttaaccccaactgtcgggtatatgtctgccagtcacggcggctagcatcatgtaataacgtatgtttagccagatcttccggtgtcttcaagggtttttcgccagtcagcagtagcgggctacacaccggcaataaatattcggcgtacagtttttccacccgtagccccggccagttgccccgaccataaaatatcgccacatcaacatcatccgccagcttatcttcctgacgatcaaccgcctggattcgaacgtcaattcccggataagcactattaaagctggaaagtcgcggaaccaaccaatgaatggcgaaactggggagtaaactgaccgtcaacgcccccttggcgctacgggcctggagtttacgcgtcgcttcggttaattggctaaatatctctttgatatcgaggaaatagctttgcccttcctcggtcagcaggagactacgattacggcggcggaacagttttagccccaaaaaatcctcaagagacttgatttgatgacttactgcggcttgggtcacaaaaagctcttctgctgcgcgagtgaaacttaaatggcgtgctgcggcatcaaaaactcgtaaggcatttagcggtggtaatcgtttagacatggctattaaactttgatgttaaatgaatttaacaattagatcacactatgtaacctattagtttttttaatctgagccattataaattgtccgttgagcttctaccagcaaatacctatagtggcggcacttcctgagccggaacgaaaagttttatcggaatgcgtgttctggtgaacttttggcttacggttgtgatgttgtgttgttgtgtttgcaattggtctgcgattcagaccatggtagcaaagctaccttttttcacttcctgtacatttaccctgtctgtccatagtgattaatgtagcaccgcctaattgcggtgcttttttttaccttgcgatcgcgaattactgatccagttcgaccatctctttcacgtcagtacggttgatctgctgtttgttgccattagcgtctttatagctaatcataccggtatcgttatcagtctgtggtttgccgtcagagacgatggtacgtccgtcattggtgtgcatcacatagttgctaccggaacaggcgctcagggcaaaagtcagcatacaggcagaaataattgcggcagtctttttcatcatcttctccttaaagcgattaataaatcttaatagtattgattaacaggctaaaattaacgcctaacactattcagcatatgttacttacgcggcttcgccaggatatccagataattctgatggttagcactctccttgtatcaaagtgaattttgcgtcacgatcggtgcatcaagccgaggagtaccatgaacgtttttaatcccgcgcagtttcgcgcccagtttcccgcactacaggatgcgggcgtctatctcgacagcgccgcgaccgcgcttaaacctgaagccgtggttgaagccacccaacagttttacagtctgagcgccggaaacgtccatcgcagccagtttgccgaagcccaacgcctgaccgcgcgttatgaagctgcacgagagaaagtggcgcaattactgaatgcaccggatgataaaactatcgtctggacgcgcggcaccactgaatccatcaacatggtggcacaatgctatgcgcgtccgcgtctgcaaccgggcgatgagattattgtcagcgtggcagaacaccacgccaacctcgtcccctggctgatggtcgcccaacaaactggagccaaagtggtgaaattgccgcttaatgcgcagcgactgccggatgtcgatttgttgccagaactgattactccccgtagtcggattctggcgttgggtcagatgagcaacgttactggcggttgcccggatctggcgcgagcgattacctttgctcatagtgccgggatggtggtgatggttgatggtgctcagggggcagtgcatttccccgcggatgttcagcaactggatattgatttctatgcttttagtggtcacaaactgtatggcccgacaggtatcggcgtgctgtatggtaaaagtgaactgctggaggcgatgagcccctggctgggcggcggcaaaatggttcacgaagtgagttttgacggcttcacgactcaatctgcgccgtggaaactggaagctggaacgccaaatgtcgctggtgtcataggattaagcgcggcgctggaatggctggcagattacgatatcaaccaggccgaaagctggagccgtagcttagcaacgctggcggaagatgcgctggcgaaacgtcccggctttcgtagtttccgctgccaggattccagcctgctggcctttgattttgctggcgttcatcatagcgatatggtgacgctgctggcggagtacggtattgccctgcgggccgggcagcattgcgctcagccgctactggcagaattaggcgtaaccggcacactgcgcgcctcttttgcgccatataatacaaagagtgatgtggatgcgctggtgaatgccgttgaccgcgcgctggaattattggtggattaatgacaaacccgcaattcgccggacatccgttcggcacaaccgtaaccgcagaaacgttacgcaataccttcgcaccgttgacgcaatgggaagataaatatcgccagttgatcatgctggggaaacagcttccggcattgccagacgagttaaaagcgcaggctaaagagattgccggatgcgaaaaccgcgtctggctgggatatacagtggctgaaaacggcaaaatgcatttctttggcgacagcgaagggcgcattgtgcgcggcctgctggcggtgttgttgactgccgttgaggggaaaaccgccgccgagttgcaggcacagagtccactggcattgtttgatgagctgggattacgtgcgcagcttagcgccagtcgcagccaggggttaaatgcgttaagcgaggcgattatcgctgcgacgaagcaggtttaagcacagaaccgggtcggataagacgttcgcgtctcatccgacctgattgtttaaccctgacgcgccgctttcgccatcatcttcttcagcgcatgagaaaccgcaacaaacccaaaggtggcggtcaccatcgttgccgcgccaaatccagatgcacaatccatccgcttcggcccttctgccgtggctttcatcgcacacaccgtaccgtcactctgcgggtacaccagcgcttcagtagaaaacacgcaatccacgccgagcttacctttactgtttttcactacgccaaaatcgcttttcaggcgctcgcgcaacttcgccgccagcgggtcctgaatcgttttcgccagatcggtaacctgaatctgcgtcggatcaatctgcccacccgcgccaccggttgtgaccagtgggattttattgcgccgacaataagcaatcagcgccgctttgggccgtacactatcaatggcatcaatcacgtagctataacccacgctcatatactgcgctacgttatccggcgtcacgaaatcatccaccaccgttacacggcactccgggttaatctggcgaatacgctccgccataacttccgcttttgccagcccaacgttatcgcgcagggcatgaatttgccgattggtattggtgacgcacacatcatccatatcgataagcgtgattgcgccaatccccgtgcgcgccagcgcttccgccgcccaggaaccgacaccaccgataccaaccacacaaatatgcgcgtcagcaaacagttgcaacgctttttcaccatacagacgcgctgtgccaccaaaacgctgacgccatgcatcactaattaccacagacatagcacctcagaattaaaaagggcgaggttatccctcaccctaaacgcataaatgcctgatgcgctacgcttatcaggcctacataactcctgcaatattttggatttgcatgatttgtaggccggataaggcgttcacgccgcatccggcatgaacaacgcgcacttagtcaataatcaggatgtgaggttacccctcaccctgtcatatccgtaaaaacggcatacagaatatcacatcagccgctaaagacgttacctgcgcccggggcggttttcagcacccagacacgtccatagtggttgtaccaacctgcgcggtgtccggcttccggcccgatcccttgatagatatcgaagtgttggcctttgattgcaccaccgacatccagcgccaccatcagacgcagttcgtactgaccattaaatttgccgttattatccagcaacggcacttctgccagcaaggtagtacctggcggaataatggaacgatcagaggcaacactcgcgcgaccaaccagcggcaccgcacttgcccctttcaccggagcaaaagattgcggtttaaagaagacgaaagacgggttctgttccagcagctcgcgaacctcggcttcactgtgtgtttcgccccagtgacgaatcgcctgcatgctcatatcttcttttttcacttcgccacggtcgatcagcaccttaccaatgctgcgataggcatgaccgtttttccctgcatagctgaaaaagttaagcggactgccatcaccaaagtcgatatacccactaccctgcacatccataatgaagttatccatcagggagttactgtaagcgagaatatatttatcactcaatgcccccgcgtagatctccgcacgagacggcagacgaccacgttttggcggcatacggtaaataggatactggaactcgccctggcgggtatggcgcgcctgaattaccggcgtgtaataaccggtaaactgcacgttaccatagttgtcggcaccttccatctgccaggcatcaatgccgaactggcgcatattgcgggtatcaccgcctgcgcgcagccactcttgcaccgcgttataaacattactctggttgccatacagacgcggactgctattacggatatggttaatttgctcggcaaaatcaccggcgttaatcggcgcgccaacggcatctggctggttcaccagagagaaaggctgggtaaatttcccgtctttatattgctgtccgcgatcggttggtttggaagagcaggcggcaagcattgccacaaccgtgcccataagaaggtactttacccaacgtcctttcattgttctcttcttcaggttaaaaaataaggcgcaacgaagataacaaaccgccgcgtttaatgaaatgagcagcctctccctgacgcaaattttgcacaaaaaataggctttagtgatttgtttttgttcaaaatcatgccaaatccgtgatcggggtaaaaaaaaggttgcatgaaaacgcgagcggagtatagtgcgcatccacggacgcggggtggagcagcctggtagctcgtcgggctcataacccgaaggtcgtcggttcaaatccggcccccgcaaccaattaaaatttgatgaagtaaagcagtacggtgacgcggggtggagcagcctggtagctcgtcgggctcataacccgaaggtcgtcggttcaaatccggcccccgcaaccaatcaaatttgatgaagtaaaagcagtacggtgacgcggggtggagcagcctggtagctcgtcgggctcataacccgaaggtcgtcggttcaaatccggcccccgcaaccaattattgaacaccctaacgggtgtttttttgtttctggtctcccataaaaaagcgccattcagcgcctttttatcatccccttctcgccagcgtcgccccatcggcaaaatacgctttaatccccgcaagaatagactccgcaacttcctgctggaaagtcgccgttttcagtttacgctcttcctcaacgttactgataaacgccgtttcgaccagaatggagggaatatctggtgcctttagtacggcaaacccggcctgttcaacttgatttttatgcagcttgttgattttaccgagcttattcagtaccgctttaccaaacttcaggctgtcggcaatggtcaggctctgtaccatatcgaacatggtgtggtcgacatagcggtcaccgcttttgctcacgccaccaatcaagtcgctggcgttctgggtttgtgccagatattttgccgcagtactggttgcacctttggtactgagcgcaaacacagaggaaccgctcggctgacgactggtaaaggcgtcggcatggatagagacaaacaggtcagcacgctgtttctgggcttttgctacgcgcacttgcaatggaatgaagatgtcttcattgcgcgtcatgtacaccttcatattgccctctttctcgatcagagagcgcaaacggcgagctatttgcaataccacatctttttcgcgcgttttgtatttccccaccgcaccggagtcttcgccaccgtggccagggtcaagcataatgacaatcggacgatcgcgccctgctttacccggttgtggaccactttgcgctggcggcacctgcttttcgaggtcgcctttgttgtaatcctccagcagcgccagcagcgggtcctgcatatcctgtgcattggccggatagaggtccatcaccagacgctctttaaacccggcgaccggcgcaagggcaaacagctgcggttttacgttttgctttaattcaaaaaccatccgtacggtttgcgggtcaaattgcccgacgcgcgcgctcttgatgaacgggtcgtctgcacgaatttgtgccgccatccccttgagtacgctgttcaggtttacatcttcgatatccaccaccacgcgttcagggttactcaacgcgaactgcttatatttcagctgacgattactttccaccgtcacgcgggtgtagctggacgcaggccagacgcgcaccgccacgacctggctgaccgcagccagactgacctgacttacgctcaatagccacatggcacccgcgccttgcagtaaacgacgacggctgattgcagtgttggatccactcatgcctctcccgagcaaaagaaatctaagctgtgtaacaagtaaacgactaatttgaccggaaactttagcgaaagacgcataatctgtcatctaataaacggtaaacattctttttatattcacggcattactgataaaaaagtcgctctcgcataaaatttacacttgcaccctgcgaaaaaacagaataaaaatacactaatttcgaataatcatgcaaagaggtgtgccgtggtaaaggaacgtaaaaccgagttggtcgagggattccgccatagcgttccctatatcaatacccaccggggaaaaacgtttgtcatcatgctcggcggtgaagccattgagcatgagaatttctccagtatcgttaatgatatcgggttgttgcacagcctcggcatccgtctggtggtggtctatggcgcacgtccgcagatcgacgcaaatctggctgcgcatcaccacgaaccgctgtatcacaagaatatacgtgtgaccgacgccaaaacactggaactggtgaagcaggctgcgggaacattgcaactggatattactgctcgcctgagcatgagtctcaataacacgccgctgcagggcgcgcatatcaacgtcgtcagtggcaattttattattgcccagccgctgggcgtcgatgacggcgtggattactgccatagcgggcgtatccggcggattgatgaagacgcgatccatcgtcaactggacagcggtgcaatagtgctaatggggccggtcgctgttagtgtcactggcgagagctttaacctgaccagcgaagagattgccactcaactggccatcaaactgaaagctgaaaagatgattggtttttgctcttcccagggcgtcactaatgacgacggtgatattgtctccgaacttttccctaacgaagcgcaagcgcgggtagaagcccaggaagagaaaggcgattacaactccggtacggtgcgctttttgcgtggcgcagtgaaagcctgccgcagcggcgtgcgtcgctgtcatttaatcagttatcaggaagatggcgcgctgttgcaagagttgttcagtcgcgacggtatcggtacgcagattgtgatggaaagcgccgagcagattcgtcgcgcaacaatcaacgatattggcggtattctggagttgattcgcccactggagcagcaaggtattctggtacgccgttctcgcgagcagctggagatggaaatcgacaaattcaccattattcagcgcgataacacgactattgcctgcgccgcgctctatccgttcccggaagagaagattggggaaatggcctgtgtggcagttcacccggattaccgcagtagtagtaggggtgaagttctgctggaacgcattgccgctcaggcgaagcagagcggcttaagcaaattgtttgtgctgaccacgcgcagtattcactggttccaggaacgtggatttaccccagtggatattgatttactgcccgagagcaaaaagcagttgtacaactaccagcgtaaatccaaagtgttgatggcggatttagggtaagcgatgaaaatcgtcggatgcgacatgcgtaacactcgtacgtcgcatccggcaattacgtttattcccgactactaaacaacgccgccagaccactgcgccgctcagtacgagtggcgattgccgcacttaatatgcgctcatcggcatacaggctcagacggcgacgcgcgcgggtcaccgcggtataaaccagctctcgcgttactaccggcgtgcgttggctcggcaaaatcaacgccgcatggtcgaactcgcttccctggcttttatgtaccgtcatcgcccacgtagtttcgtgctctggcaagcgactcggttgcacagacttaatattgccgtccggcatcgcaaaccagacgcgcgtcccctgcccgcgatccagcgcaataccgatatcgccattaaacaacccaagcgcgctgtcattacgggcaatcatcaccggtcgaccttcgtaccaacgagagtgcggatgacgatgaattttgcgcttctgttgcataaactgctcaattcgctcattcagtccagccacgccaaacggcccttcccgcagggcgcacaaaagctggtactcattgaacgcctgaatgattaaatccggctcggcacgcgcttgcagcagatccagataacgtccgtaacccgcaagagcttcctcaagcatcgcaatataatcttcgccgctctgtaaaagccgtttttcgatatcagtaaaatcctgctgaaaaacggttttcactgccgttttatcaccacggttgatcgccgcagctaactgaccaatgccagaatcgctgccgaaacgatagcttttttgcagcaggcagagactgtcgcgcaaagatgccgcttctgtgccggttcctgccggaacgtgagtccccgtcaggcggcttagctgcctggcacgctcggcggtaaagcccgcgttggcataagcgcagatatcgcccagcacagccccagcctcaacgctggccagttgatcacgatcgccgagaaagatcactcgcgcatgatcgggcaaggcgtcgatcagtctgctcatcataggcagatcgatcatactcgcttcatctaccaccagcacatcaagatgcagcgggttaccggcatgatgacgtaaacgctggctacccggctgcgcgcccagcaatcggtgcaaagtgctggcatcttccggaatgcgtttcttttgttcatcggtcagcggtaactgtcgcaaagccttgccgagagattcggttaagcgcgcggcagctttacccgttggtgcagccagacggatacggcagcgttcgccgtcggccatttgaattaacgctgccagcaacttcgctacggtggtcgttttaccggtgccagggccgccggaaatcacgctgatccgccgcgtcagcgccactgccgccgcaactttttgccagttaatttcatcgcttactggaaaaagtttgtccagggtttgcgccagtagagcttcatcaacctcaatggcatgattcacttcgttgaaaaagcgtgccactgtgcgctcgttacaccacatgcgattcaaataaagacgatcgccacagaggatcatcggcgtgggttcatctcccctgctgaccgcttgagaagccagcaagcattcttcccaattttgtagctcaccgatttcactgacacaggtcgccaacagcggatggctcgcctcgttattttccagtcgactaagcggcaaacaaacgtgtccctctccggcatcatgacttaacagtgccgccgcgagggtgacggcaggatgttcatctcccgccacggtcagggcaaattgcacatccagcgggcgtagctgtttgtgctccacagcttccagtaattgcttttgcaatttcattacgcctcctccagggtcataccggcaaacatctcatccatcagggcaatcaacccggcgttgggtcgggttgtgtaaatcccctgttgcggatgttctttatcaacgccacgcaggaacagataaataacgccgccaaagtggtgctcatagtcgtaatcagcaatgcgatggcgcagataacgatgcagcgccagggtataaagctgatattgcagatcatagcggtgtgcctgcattgccgctgccatagcctgttgggtgtaagcgctactgtcttcacccaaccagttggatttatagtcgagcaggtaataacgcccttcgtggcggaacaccaggtcgataaagccttttaacatgccacgtacctgcatgaactccagcggcgggcagcctgcggatagcgggtcaaactggcggattaacgtatcaagctgactggcgataagcggttcactaatcggcagataaaactccatctccacctgtttattgcgggcggaaagttgactcaggcttacgccggtttcattgagaggtgcctggaggacagccgtgatccactcggtcaataccggttcccactggctttcaaagccgccgagttccagtttttcccgcacccagttcgggtcaaccggctgggtaaaatccaggtcttcaaacaaactgtgcaagaacgtccccggactcgcaccgcgcggaaactgatgtggtgttaacgtcggttcttcaacgacgctggcaacgcctgcagcatcgacatccagccgaggcatcaaatcctgggcgataccgtgaccacgctgttgcaaaccagagtagctggtgacgcgccagttatcgccgggcaatcgttgtaacgtcttcgcattcagctctgctgtagaaacatcattaacctgccagggttggttatcaccagtttgtgccgtttgccaggcaatatcatcatcgcataacgcttcaatacaggtgcgaagccctgccgcatcttgcggttcccctttttgcagcaaacgcccgagcgcactttggtggacgtcggtgtcaccttttttatcgccacgacggcgcaccagcggtgcaacgccgagactgcaatgccaaacgctacgtgtcagcgccacgtaaagcaaacgcagatcttccgccagacgttcggcctccgcgaggtcgacgctttctggcgcagcattaagatccagaactgcctcaaagctgtggcgatcgtgataaaacgcctgctcctggacgcggaaattggtgataaacggcagccagaccaatggatattccagccctttgcttttgtggatcgtgacaatctgcaccagatgtttatcactttcgagacgcatttgttggctggaggcattactgtctggctcgaggatatgttggcttaaccagcgtaccagcgcatgttcactttccagctgcgttccggcttcttgtagcagttcgctgatatgcaagatatcggtaagacgccgctcaccgcctgccgttgccagcaagttttcagcaatgttacgcgcgctcatcagcgcccgcagcatcggcataacgccacgtttgcgccagatttgccgataaccatcgaactcttcgactaccacatcccacgcatgttcgtcattgttcagcgtttcgatatccagcgcgttcagccccatcatactcgttgccagcgcactacgcagggtgttctcacgttcgggcgtcatcaccgcctgcaacaaccaaagcatttcctgcgcttccagagtttcaaaaacactgtcgcggttgctaaggtaaacggaagggatttccagcaacgttaaggcatcgcgcacctgggcggcctcctggcggctgcgcaccagcacactgatgtcgctagcacgcaccggacgcgcgtcgtcgccgttcatcagcaacgcttcgccccgctgtccggcttgtagccagtcgcggatttgcgcagcacatacctgcgccatggtactttgataatcgccaacgccgcagctttcgccttccatcagccacattttcatcgcaggctgtgtttcacctttaaatacaaaacgtaacgcctgatttttcccggcacttttcactggaataaacggtatttcgcgaaacatgaacgcgtcatcagtctggctgaaaagcttattcacgctgttcaccattcctggtgcggaacgccagttggtgtctaaagtgtagtgggcgtgaacttcgctacgcgccttcatataagtgaagatatccgcaccccggaatgcatatatggcctgcttcgggtcgccaattagcaacaatgcggtttccggctgatggtgccagatacggcgaaaaattcggtactgctgggggtcggtatcctgaaattcatcgatcattgccaccgggaatcgcgtacggatcgccgctgccaacacctcaccgctttcgctacgcagcgcggaatcgagccgacttaacatgtcatcaaaacccaattcgccacggcggcgtttttcacgcgctactgtttcgcggatctcagccaatgcgcgggtgatcaccagatcgcggatgctcaatggttctgcaagcagttgatcgatcgcctcaaacagtggatgtcgcggggtttcccccccggccttcgtgcgatcttctaagaaacgctgggagaatttttccaggctctccggcaactgataactgtttgtctcttcttctgcccaggcgctgatcttgtcgatccatttagcctgattgctacggttaaacttgcgtcgatcaataccagaagattcgatcagcgcatccagttcacccactgcgtcgcgccactgctgttttaccgtatcaatacgcgccacaatttgcgcgtgacgggaagccagcgtttcatcatcgggcggcggtgctttgataaccggcgcttcgccttgcagataacgattaatatcgcgcagcaacgcctgcggccctttccaggtttcaaagacgacctgggctatttcacgcggcagcgggtagcagtggcgacgccagaaatcggcgcaggcctggtagcgtagcagagactcatcttcaatcagctgctgctcaaacagcatgccggattcaaaggcattcaggttgagcatgcgctggcaaaagccgtgaatagtaaagactgccgcttcatccatctgccgttcggctaacaacaaccactgcgcggcttgcgctttatcgtcgatctcttccagcaggcgttcgtacagtggattgtcggtggtttcacgcagacaggcgatgcgcaactcgtggatattgctacggatacgaccgcgcaattctgccgtggcagcctcggtaaaggtgaccaccagcagttcttcaacggtcagcgggcggggaaaggcggcggaaccgcctagtccaagtaacaggcgcaaatagagcgccgcaatcgtaaaggttttgcctgtgccggcagaggcttcaatcaggcgctcaccctgtaagggcaagcgcaaaggatctagtgtctcggcgacatcactcattcttttcactcatcaggggcattgtttgctgcaacgcgctgacgttctcccacactttccagccttcagggtgtacatattcggctttcccgttctggctgccggaaatctggctcagaatagccatgccttgcggctcgaccaccgcctgatggaagaaatcagcaagtttttgcggcgtcagcagttttatctgggccacgattttatcacggctatcgaagcgcatattgccgcgatcgaaatctttacttaacttgcttgcttcttcgccgagcgtttgcggtgcctgcagcatctgggtaattaccgcctgctggatttgcgcaaactcatctggcttcatcgctcgcaattttgcctctgcggttgggaaaaacgccttgtaacgctcccacaagaaactaggctgtttatcattgctttgcaaaaggaagcccatgccccactgacgccccacgctcattggaaacgcaaacacggcatagcccaattgttcttcggtacgcaactgattgtagaaccacggctgtacgatctgccccaacagagagctataggcactgctggtgtattcatcgtagccagtcggtacaaataccgctgccagtgcggagtcggtgctgttaccggctttttcaaagatgacggattgttttttatcgaccactacatctttgtttcgacaccactcactaccatcagcgcccaactgtttttgcacatcgcgtgccagcgttgttgcctgggcctcggtcatgttgccgataaccataaactctggtcgagccccactttttaaggcgtcgcgataggccagcacctctttcaacgtaatggagggcaaaattttacgccgttcatctcggctgaagtacggcacttggctgagcatctgcgcgggcataatcgcctgctcaaacgctttacccttttctgcggaatccatcatctggttataccaggacttcgcctgctcaagctgatcttccgtagcggtatagctaaagtacccctcgagcaatgcctggaacagctgcggcagacgctgggtgtaaccattagcattaaccataaggccgttgttagcgttggtggaaaaacttatgccaccaacgctcgcctggttgcttaactgatcaagcgccagccctgcgagataatcattgagcgcaaacatcacctgattgcgggcgctgtccatggctttcggattacgcaaaatcaggctgacatcagctttgggctcgctggcaaaataacggcttggcgcatacaccacgcgcagattgctctcatcaacaatcagctctggatggtcgtatttcttctcactcttaatcaggctgaaatcatcaggaatataagggttaagctctggcaaagagagcgcaatgtcggcggcttttttctgccagtcggcgaaagtttgtgcgctgattttatcgacctgatacggcgcatcgacaaagtaagccgttttgttgtgcggctctttcgggctgatataccagatacgcgcattctgcggcgtcatcatcgccagacgttcctttactgctttagcatcgtaccgatcggcaatattgactgcatccagcgtatgctcaacaggaacgcgaatcatggtatctgccagccattcgacgtaatccatatcacgggtgatgctcggataacggaagtcgatatccagcacattcgccagttcatcgaagtattgtttatcaatgcctttttcacgtaacagattgagatagctaaaaattgccgccacaacctgatcgcgattagccaggcctttatcggttaaagacgcagagatcgctaatacgccgctgttgccgttgacgataggatcggagttggcgctaatgccctcaactaatccctgcttttgcagccagtcagaaagtgtacctgggctgcgattgccaatcagataggtaatcaattcatcggttttactacggaacttcgcactgttgttatcgatgcgaaactcaacgcgcaacactttacgcggcagcgcagggacgtaatgaatgataatgcccttttgcgcgtcggtgactaccggcacggtgatttccggttttttgctctctttgttcggcacgcgaccaaaggtgtccgccgccatttttgccaactccggcagcggtttattactgtaaataaccgccttcatcaaattggcggaatagtacttctcgtggaaatctttcagcgcctgctgcaccggattaccaggtttgtcgcttaaagtttcgaggttaccaccagaaaacttactaccggggtgtgccgggttaatggtttctgcgctgacctgtgccatgcgcatcccgtcacgcgtacgcgccatggttaattcagcgttcaccgcattacgctcacgttcggcatatttcttgtcgagcaaaggttcagcaatagcatcggccaggcggtctaccgcaccaggcaaggcgtcgttctcaacttccagatagaaagccgtgcgatacggcgcagtgctggcattgtgactaccgccgtgcattttgagatattcggccagactgtcagcctgcgggtactttttgctccccatcagactcatatgttcaaggtaatgtgccagcccctggtacgcctcgggatcttccaggctcccaacgggcaccaccagcgcgctgaggcttttaactgcctgcggatcagaaaccagcaagaccaccataccgttatccagacgtatagcctgatactggcggttatctttatcacttttacggatggtttcctgaatcggctgccatcccgtttctgcctgacttaagggtgcccaaagggcaactaacaacaataatgctttgaaccaggtgctgcggggcattcacggacctcataatcaacttaattttctgtccagattcaacacgttaacgcaaatcatctgccagaatttaatcttgtgctgcacgagtcagcctatgtttatataaccatcagtccgtgactggtgcgcatcataaagtaagcggatagattgcgcaatttttatacagcactcaactctgattaaagcgaaacagcggtaacaggaaacgttggctctgttcaacgatggcctccattgtctctggtgttaattgccgccagagcctttgataccagatatcatcaccttcgccacgcaccatcatgttgccttcgtaagcctgaaggaatttcgtacgggctttttgcaacgtggaatcgtcatccagcatggcatcgttttgcgcgtcataacaggtttttagccacgcgccgccactttcaggtaacaccagcaatggcgcggacattccttcacgatacccctcaatcagttgactgaggtaatgcaaagcctgttcggctgcaagcggcggaaaacgccactcgccgtctttgcgtagaaaaaggcgactttcaccattaccaccgctggcacagtagacaaggtgttccagccaaagttgcattccctgggccacacttaataaagagggacgccagcgcaacaggccatccggctgcacctgcggcaaccagccagttatctgcacaccgttgcaggcgagatcaatttccatactctgccccggctggcgacaggcaatgactctgtcggcaagctgctgcatctcctggcactgtgtttcccagaaaatttcaccaaaagcgccatacggtaaatcccctgccgctcggaagcggcggaacaagcgttcggcatcatcctgctcaaccagtgcattcaataactgctgattgatttgataacggctaagtccttccagaataaatggctcggtgtcggggatttcgctgtcttcagtacggaagttcacctgcaaacgcatctggaaaaatgcccgcaccggatgtgcccagaatcgttgtagcgtttccagcggcacggtttccggtaaggtaaacggcagcggctgaacaaattcagaatgtgctttaccagcctggctggccgcaggtagccattcacgagcatagctttgtcgttcgcctggctggtagttttgtggatcaaacggcatccgggtatggaggcaagtaagatgcgcttttacccttgcctcgctttcatcacagttgagcgcttcatcgcccggtagataatgactttgcccgatgtagtcgatcagttcctgcaccagtacgctcgggaaacgctcactgttatcctgaatggaacgaccgatatagctgatatagagtttttgctgcgcggaaattaacgcttccaggaacagatagcggtcgtcatcgcgacggctacggtcgccacgcttcggtttctggctcatcaggtcaaagcccaatggcgcaagctgacgtggataaacgccgtcgttcattcccagcaggcaaaccactttgaacggaatactacgcattggcatcagagtacaaatgttaaccggtccggcgagaaaacgctggctgatacgttcttgatccagacgctgtgccagttcatcacgcaatagactcagcggcaccgcgtcgccatactgcgcacctaaaccttcggcgataatcgcctgccattgttgttcgatcagcgtcatcgccgcttcggtttccgcatccggcaggaagaaggcgttgagcatatcgcgacaaaccggcaaccactcttccagcggacgctcctgtgccagcccgcgacgccagatgtttagctgcattagcagactagccagatgccccaccagttctgcaattaagccgctgctttcatcataaggtagaacgctttgccactcgccctgcgcgctctccatcgcgtagcccaacaacatacgcgtcaggccaaatcgccaggtgtgttgtccggtggcggggagttccagctcgcgaacgttgtcgtcatctatgccccaacgaatgccggattcgttgacccactggcgtaaataacgcagcccttcttcggtgatgtcaaaccgcgccgccagcaccggcacatccagcaacgccagcacatcctcactcacaaaacgactgtcaggcagacttaacaggctgataaacgcttccagtaccggatgactctgccgcgcacgacggtcggaaatggcgtaaggtaggtaacgatccgcaggtgcgctaccaaacacagcctgaataaacggactgtagctgtcgatatcagccaccatcacgatgatgtcgcgcggagtaagtgtcgggtcttcctccagcatcgccagcaggcgatcgtgtaaaacttcaacttcacgctgcgggctatggcaaacgtggaaggtgatactgctatccagtggatcaagcgggcgtttgttatcgctacgggaaaactcttcgatgttcacaccagcaacggcgcggttttccagttccagaatgtcagactgaatgttatgcagcaggttatctggcgtgacatcgacaaaggcgtccagctcctggctgctctccaggtcagaaaggagataaatgtagtcgcgcccaagcttaccccaactagccagcagcgggttgccgacatcctgttcaccatcgctgttaaagagctgcccggcattttcgctatcacgaaatagcggcaattcgcgatcttcaaaactgtgtcgacgctgacgggtcagcagtttcgccagataagcaggatctttaatatcgccccagtaataacggcaggggttggtaaacaggagatggatttcaatatgtttacccagcgcctgtagcgcctggagataaacaggcggtaacgcggaaataccgcatataaagacgcggctaggtaaccccggcgggcaggtcgtcgcggactccagcgtttcgataaagcgctgatagagattggcgcggtgccagcgcggttgcccgagttgatgggtatattccaccagcgccttccacaacggggcttgccaggcctgtgcttctcccagcccttcaaccaaatgtcctgtttcccactgtgccagccagtccggacgatagaccagatactggtcaaacaggtccgccgctttactggaaagctggaacagttttcgcttgtcgctatcgtcagtcagataatgccgcaacagggtaaagtcttcgcgctccagcaattgcggcagcagagtcatcagtttccagctcatgctctgtttgttaaaggcgctctctttggggatttccggtaacacccggacgaacatatcccagataaagctcgctggcagcggaaaatcaatgtttgccgcaataccaaacttttggctcagggtcatttgcagccactgtgccataccggtactttgcaccagaatcatctctggttcgaaaggatcgtccagccgttcgcgttcgacaataaactccatcaacgcttccagcacgtccagacgattggaatggtagacccttaacatagcggctcctgattactgacgattcgggcaatgcaggcgggtcatctcgccttctctgcccccgggactaactagcgtaacgctgatgctgacacatcccgcctggcttgtctgcattcggttgacctgccagttggcaggtgggctaatcgcgcgcagttgcgtttgctgccagccatgccgccagagctgttggtactggtttctgctggcaagactgttcattaatgttcgctggaaaccgcttaacgcagtgacaatcatcaccatcaacaccatcgccaacattacctccggcaggctaaagccttgttgattcttcagggaagcactcataacgccctctctttcagcggttaaatcagggaagctgacataacgccctctctttcagcggacaaaaatcgctccagccgcgtgggctaaaaacaatgtttccatcaatgacttcgcctgttcgccacaagctaacgccttcataaccggcaatcaataaggcttcattatctgccagtaaacgcaaacaaacctgggcatcggtttcagcgtactggctgcactgaactgctggctgcgtctgccagcagtgcatttttccccacgccagcgcgctctgaacgatggcctggcggcgcaaactctgactttccatgctcacgcgagaggcaaaactgcgatcctgttggctcattccttgtaatagcaaactacccaaaaccagcagcatcaggaccagagccagactgctaacacccttttcgcggttcacaggttgaatcctgtcacgctatagctggcattcaccacggtttgcggttcagacttactggcagcacgcatattaaccgtcaacaccgggctgaagccgctgacatcctgacgtacgacctgaaaagtgtcgataatgatggcatccggattagtgactttatcccagcccttaccttcacaggatgtcgcaccgcgtagcgtttccagcacatgctccttcagacgaaatccaatctggtcggactcttttaccggttcgcgatcccagataccgttactgttcgcatcccactgcacaatgacacagtcaccctgtccgacaatttccagcccttcgccggtacagatgccatgacaataacccgccctctggagatgcttcgcgacggtaaatacccgcagccagatttcatcttccagcgccagcttacgggtgctcgttaaactttcacgctgtaacgcaggcagaaagcgtgccgcccccagcaacaatacgctactgatcgccatagcaatcaacacttccagcagagaaaaaccttgctcttttacaggcatccttctgtttctccttgctgacaaagccggagtcttccccacgggctaaccaccagccaccactcgcccgtactgtttttgaagcgaatatgcccggcccatgcggtattgcgcaggccaaagaaagcaaggctaggtgtcaggtcgctcatttcgacttcgggccagcgtggcacaaagaccaatggactactgccatgacaggtattggccccagcagcggaactcacaaggcaccataacgtcccctccctgataacgctgatactgtggtcgcggttatgccagttggcatcttcacgtaaatagagcaaatagtcccgcgcctggctggcggtttgccatagccgttggctctgctgccagtattgccagccatagagtccacttgcgcttagcatgaccaaaatcagcatcgcgaccagcgtttcaatcagcgtataaccacgttgtgttttcatgccggcagtatggagcgaggagaaaaaaagacgagggccagtttctatttcttcggcgcatcttccggactatttacgccgttgcaggacgttgcaaaatttcgggaaggcgtctcgaagaatttaacggagggtaaaaaaaccgacgcacactggcgtcggctctggcaggatgtttcgtaattagatagccaccggcgctttaatgcccggatgcggatcgtagccttcaatctcaaagtcttcgaaacggtagtcgaagatggattcgggtttacgtttgataatcaacttcggcagcggacgcggttcgcggcttaattgcagatgagtttgatccatatggttgctgtacagatgcgtgtcgccaccggtccagacaaaatcacccacttccagatcgcactgctgcgccatcatatgcaccaataacgcgtagctggcaatgttgaacggcaggccgaggaagacgtcacaggagcgctgataaagctggcaagagagtttgccgtctgccacatagaactggaagaatgcatggcacggtgccagcgccattttatccagttcgcctacgttccacgcactaacaataatgcggcggctatccgggtcgtttttcagctggttcagtaccgtagtgatctggtcaatatgacgaccatctggcgttggccaggcgcgccactgtttaccatacactggcccgaggtcgccgttttcatcggcccattcgtcccagatggtgacattgttttcgtgtagataagcaatgttagtgtcgccctgcagaaaccacagcagttcatggatgatggaacgcaggtggcaacgtttagttgtcaccagcgggaatccatcttgcaggttaaaacgcatctgatgaccaaaaatggaaagcgttccggttccggtacggtcgtttttctgtgtgccttcgtcgagcactttttgcatcagttctaaatactgtttcatggttcctcaggaaacgtgttgctgtgggctgcgacgatatgcccagaccatcatgatcacacccgcgacaatcatcgggatggaaagaatttgccccatgctgatgtactgcacccaggcaccggtaaactgcgcgtcgggctggcggaaaaactcaacaatgatgcgaaacgcgccgtaaccaatcaggaacaaaccactgacagctcccattgggcgtggtttacgaatatacaggttgaggataataaacagcaccacaccttccagcagcagctcgtaaagctgacttgggtggcgcggcagcacaccgtaagtgtcgaaaatggattgccactgcgggttggtttgcagcagcaaaatatcttctgtacgggagccagggaacagcatggcaaacgggaagttcgggtcaacgcggccccacaattcaccgttaataaagttgcccagacgcccggcaccaagaccaaacggaatgagtggtgcgataaaatcagagacctggaagaaggaacgtttagtacggcgggcgaagataatcatcaccacgataacgccaatcaggccgccgtggaaagacatgccgccgtcccagacacggaacagatacagcggatcggccataaactgcgggaaattgtagaacagaacataaccaatacgtcccccgaggaagacgccgaggaagcccgcatagagtaagttttcaacttcatttttggtccagccgctgcccggacgattcgcccgtcgtgttgccagccacattgcaaaaatgaaacccaccagatacatcaggccgtaccagtgaagcgccacgggtcctatactgaaaatgaccggatcaaactccggaaaatgcagatagctactggtcatctgtcaccacaagttcttgttatttcgctgaaagagaacagcgattgaaatgcgcgccgcaggtttcaggcgctccaaaggtgcgaataatagcacaaggggacctggctggttgccggataccgttaaaagatatgtatatgatccgcgttataaccctccgcgaatcagcccgcccatgccgcgacgctccataaaggctgcaacctgatggcgaacttcggtcgccagttgcgcttccagactacgctgcgcaagattttctgcttcggcataatcaatgcgccgcagcaggtattttgcccgcgctacagaacgtccgttcatagacagatggcgatacccaagcccaatgaggattgccacgcacatgggatcgcccgccatttcaccgcacaaacggagatcgattccatgtatttccgcttcccgggcgatcatcgccagagctcgtaacattgcaggatgaagactgtcataaatgttcgccacccgggtattgttgcgatcaacggccagaatgtattgagtcagatcgttggtgccaacagagatgaaatcgacccgctttgccagatgcggcagcataaataccatactcggcacttccagcatgatgccgatacgtggtttgggaatttcgtaaccgatcatctcctcgacttcacgtccggcacgttcaatcaggcggcgtgcttcatcaacttcatcgaggcttgtgaccatcggcaacagaatattcaggttgcccgtagcggcattagcacgcagcatcgcccgcacctggatcaagaagatctccggctgatcgagcgtaatgcgaatcccacgccaacccaggcatggattctcttcgctgatcggcatgtaaggcagctgcttatctgctccgacatccagcgtacgcaaggtgacgggtttatcattgaacatttgcagcatcccctgatactgcgccacctgttcttcttcgctcgggaaaccactttgcagcatgaatgggatttcagtgcgataaagaccgatgccatcaatacggctgcccagtttttcttcatgttccgggcttaaaccagcattgagcatgacttttatacgctcaccgctttttaactgcgcgggtaaattgacgtcatcttccgccagacggctaagctcaatctcttcactaattagccgctgatattcttgcagcagtaccggctccggatcgaccagcaattcaccgcgatagccatcaacgatcagcgtcctacgatgcagcacgctaggctgaatatccgcgcccatcacggtagggatccccagcgcacgtaccatgatcgcagcatgggagttggctgcgccatctcgcacgacaacaccgactaagcgatcctggggcagctcagcaagcgttgtcgcactcagttcatctgccaccagaatgaaacgttccggccaggcgttcggcccttgattagcgtcatcaagatgaaacagcaatcgctgacccagcgcacgtaaatcgccagcccgctctttgagatagttatcacttagcgcggcaaactgttcggcaaatttttcaatgaccgtttttaccgcccactctgccacgctgcctttatcaacctcggcaaacaattcgcgacgcagccgggtgtcgctaagcaggtggctgtaaagatcgaaaatagccgccgtttctttttgtgcaccggcggcaaagcgtttgctgtagcggcgaaactcgtttgccgcttcttccagcgccccggtcagtcgttcgcgttccagagccggatccagcgtacttgcctgatacacctgttccattaaaggtaacgtggcatcctgccagccttcggcaatcgccacaccaggtgctgccggtaatgcgcggattcgcgtctggcgatattgcccaaacaaggcagtcaactggctctgagaaagaatagctgccatctgggtggcaagcgtcaccaggaaggattcttcactttcgtcatactggcgcaactctcgttgctgtaccaccagtacaccaagcaactggcgacgttgaataattggtacgcctaaaaacgcgcggaaacgttcttcttttacggaggggatgtatttgaagctggggtgcttttgcgcatctgcaaggtttatcggttccgccagcctgccaaccaggccgacgatcccttcatcaaacgcgagcgttacagtgcgaccgcgtggttttttcagcccccgggtcgccatcaggtagtaacaacgtcgatcatgatcggccaggtagacgctacagacctcggtatccatcgcaagacagatgtcggtaaccagaatatttaacgcctcattcaggcgtggtgcgctggctaccttttcgactatttcgcgcaggcgagtgagcataattggcgtgacttaacctcttttacgtcgataagcagatgcgttttgtggttttggcgtattttcctgcagactcatcaccacactcgcgaactctttcattaccctacggtagacatcacgtttaaaactcaccacctgtctgaccggataccagtaacttacccatcgccagccgtcaaactctggtgtactgctggtttgcatattgatttctgcatcgccgctcaccagctgcaagagaaaccatttttgtttttggccgatacaaaccggcttcgtgtcccaacgcaccaaacgtttcggtaatttgtagcgcaaccagttacgcgtactagcaaggattcgaacgtctttgcggcttaatcctacttcttcaaacaattcacggtacatcgcctgctctgcggattctccggggttgattccgccttgcggaaattgccaggagtgctgaccaaatcgccgggcccacattacctgcccctggcgattacaaatcacgatacctacgtttgggcggtagccatcgtcatcaatcaccggactacctcaaaataaagctttatatacgaatgattgtttcatactccaggaagacggtaaaccactctctgcagggcattacacactaataacaattgaataactcacagttatgtgcagagttataaacagaggaaggggtggatagccgtttttattcaccttttctgtggatagagttgtgaagaactacggaattactacgggaaaacccggagcattctgaataagcccgatatagacattttaaaatattcattatcagtcaatgcattacatgtaattttagtaatgaaaaagagtaattcgtgacccaggtcacacctctcatttacgggttggcgaaagatcaaccaatgccgtatttatccacagaatgtgccactaagttaagcactgaaccactaaaaactggagtttcgtcgcacgtcaaggctgtaaatggaaacagtagtggaggtttttcacagttatcccagctttctgtggataacatggtgtaagatcctgtttattttcagtgaccagatttggaaaacccgttgcagtgttgcgcaactcgattaccggcaacctaaaaagcaatataaatcagagaattgaacaacgcatgtggaaaaagttacactgcgaatattcggcacataattgctgtttgttttttaatcaaggtatcatgacatgtcccaacctcgcccactgctctctcctcccgaaactgaagaacagttgttagcgcaagcacagcaactttctggttatacattgggagaactggcggcacttgtcgggctggttacgccagagaatttaaaacgcgataaaggctggattggcgtgttactggagatctggctaggtgccagcgcagggagtaaacctgagcaagattttgctgctctgggcgtggaacttaaaactatccctgtggatagtcttggtcgtccgctggaaacaacattcgtttgtgttgccccgttaacgggcaatagcggggtgacctgggaaaccagccacgtgcgccacaaactcaaacgcgtactgtggataccggttgaaggcgagcgcagcatcccgctggcgcagcgtcgcgttggaagtccgttgctgtggagcccgaatgaagaggaagaccggcagctacgcgaagactgggaagaattaatggatatgattgttctcggtcaggttgagcggattaccgctcgtcacggggagtatttacagatacgaccgaaagcagcgaatgcgaaagcgcttaccgaagccattggtgcccggggcgaacggattctgacgctgccacgcggcttttatttgaagaagaatttcaccagtgcactactggcccgtcattttctgatccagtaaccatcgctttgacctgccgctttccgggcatataattaccgcttcatttttttggcagggctttttagatgttatttgcatggataaccgatcctaacgcctggcttgcgctcggtacgctgacgctgctggagatcgttcttgggatcgacaatattattttcctttctctggtggtggcaaagcttcccacagcacaacgtgctcatgcgcgccgtctggggttggcgggagccatggttatgcgtctggcgctgctggcaagtatcgcctgggttacgcgcctgacaaatccgctttttacaatattcagtcaggaaatttctgcccgtgatttgattctgcttctgggtggcttgttccttatctggaaagccagcaaggaaatccacgaatccattgaaggtgaagaagaagggctgaaaacacgcgttagtagtttcctcggcgctatcgtgcagattatgctgctggatattatctttagcctcgacagcgtgattacggctgtgggtctgagtgatcacctgtttattatgatggcagccgtggtgattgccgtaggcgtgatgatgttcgccgcgcgcagcattggtgattttgtcgaacgccatcctagcgtaaaaatgctggcgctctctttcctgattctggtgggctttaccctgattctggaaagtttcgacatccacgtaccgaaaggttacatctacttcgcgatgttcttctctattgcggttgaaagcctcaacttgattcgcaacaaaaagaatccgctctgatactccgtacgctctcctgcgggagggcgtactcactccttttaccctcacagtttaagattttcctgctttcaagatatataacgtcggtttataaacagactattatcataggtaggccaaatgaggataaccggatgaaaaaatgggcagtaataatttctgcagtcggactggcgtttgctgtttccgggtgttccagtgattacgtcatggcgaccaaagatggccgtatgattttgaccgatggaaaacctgaaattgatgatgataccgggctggtgagttatcacgatcagcaaggtaacgcgatgcaaattaaccgtgatgatgttagccaaattattgaacgttaacaaataaggtcagcatccggctggccttaagatttttctctttcccttttcccttccctctgccatttttatattccttatgtcgtgattataaaaaggaaacggctatgcaatatcaccgtataccccacagtagcctggaagtcagcacgctggggcttggcacgatgacgtttggtgaacagaacagcgaagccgacgcccacgcacaactcgactatgccgtcgctcagggcattaaccttatcgacgttgccgaaatgtacccagtacctccgcgccccgaaacgcaagggttaaccgaaacctacgtcggcaactggctggcgaaacatggcagccgcgaaaagttaattatcgcctccaaagtgagcggaccgagccgcaataatgacaagggcatccgcccggatcaggcgctggatcggaagaatatccgcgaagcgctgcatgacagcctcaagcgcctacagactgattacctcgatctttatcaggtgcactggccgcagcgcccgaccaactgcttcggcaaactcggttatagctggacggattctgcgcctgcggttagcctgctggatacgctggacgcactggcagagtaccaacgcgcgggaaaaattcgttatatcggcgtgagcaacgaaactgcatttggcgtaatgcgctacctgcatctggcggacaaacacgatctgccgcgtattgtcaccattcagaacccttacagtctgttaaaccgcagttttgaagtaggtctggcagaagtcagccagtatgaaggggtcgaactgctggcctatagctgcctgggtttcggcacgctgaccgggaaatatctcaatggtgcaaaacccgctggcgcacgtaatacgctctttagtcggttcacccgctatagcggtgagcaaacgcaaaaagccgtcgcggcgtatgttgatatcgccagacgtcatggcctggaccctgctcagatggcgctcgcgtttgtacgccgtcaaccgtttgttgccagcactctgctgggcgcaaccacgatggatcagctgaaaactaacatcgaaagtttgcatctggagttaagcgaagacgtattagctgaaattgaagcggtgcatcaggtttatacttatccggcaccataagattaacgccggttaaaaccggcgttaaatattaatgacggcgctgccagatccacagcgccgttattgccagcgcaaacagcgcaccgaagccaatgccaatgggcacgaccgggatgcctatcattaccgccaggctgtaaatgcccagcatcaacaacatggcgctgttttcgccaaggttttgtactgcaatcgcattccccgccccgacgctttttttaccccgctcctgtagcaacgcattgagcggaacgacaaaaaagccccccatcacgccaatcagcatcaacaaggcataggctggcagcagctcgtgttgcagggaaaaaatcagtaccaccacgccaatcaaaatcccggctggcatacagcgactcacggtttccagcgtaactaacttcgctgccgcacctgcgccaaccacgataccaatcgctaccatcgcgttgagataggtgggcgtagcgttatcggtaatgcccagcgccaccggtacccacagcaccaacaggaaacgcagcgtgacacccgctccccagaataaactggtgcccaccaggctaaaacgcgtttcaccattgcgccataggctggtgcaggcattcaggaaactgcgggtcatgttgatgagattccaggactgccccggacgcgccgccgccagtttgggaatgtagatattggcaacgaccgcaccaccgtaggccagtgcgcatgcggccagggcgacgaggacatgccagtcagccagcacaccaccggctacggaaccgagcaaaatcgccgctatggtagaagcttccattaaaccgttagctttcactaacttactacccgtggttaattcgccgagaataccgtatttcgccggactataggctgcagcaccaacacccaccagcgtatagccgagaaacggattgataccaaagcagatactggctgcgcccagcagcttcaggccgttggcaaacatcatcacccggcctttggcgaagctatccgccacctgcccgacaaacggcgcaaaaagaatgtaagcacctacaaacaccatttgcaggatgggctggctccactccggatagaactgcgctttcagtaacgccagagtggcaaacagtagggcattatcgccaaacgcagagagaaactgcgccacgataaccgctttcatccccttgctccacaagctagtgttagtgtgcacactctcactcatcgtgttgttccgcttcgtctacccagcttttcaacgtgacaaagtcaggtttgccgctgccaagtaatggcatctgtttcagatagcgaatatcgcgcggtacagcaagctccggcacgccgtgctcgcgggcatactgttgcaacttatcgcgcgtcagttcgttatctgtggtgaaaagcaccagtgcctcgcctttgctggcatcgctcttaatcgcagtggcatggactttatctgggctaacaccaagtgccagttgttccaccatttccaggctcaccatttcgcctgcaattttggcaaagcgttttgcgcggccctgaatctgcacaaagccctgctcgtcaaaacgcacaatatcgccagtgtcataccagccgcgctccatttcgccgcgaacattctcggcggtgggcacttccagtacacctggcttctccacccgcagatagccgttcattatgttcggccctttcagttgcaggcgtccgccctcttcgataccagggacgctcaacaggcgcgcatccattcctggtagaatacgccctaccgtaccgggtttcgccgccatcggtacgttgatagaaacgacaggcgcgcattcggtcacgccgtagccttcaaggatgcgcaggccaaatttatcctgccaaagctgtttggtactttcttgtaatttttctgcgcctgccaccacatagcgtagacgatagaagtcatacgggttggcgaaacgcgcgtagtgaccgaggaaagtgctggtgccgaacaacacggtgcaactgcggtcatacaccaactccggcacaatgcggtaatgcagcgggcttggataaaggaacacttctgcacctgtaagcagtggcgtaaacaggcctaccgtcagcccaaaggagtgaaacagcggtaacgcgctcataaagcgatcgttggtggtgaagtcggcaatcgttttaatctgctcgacattcgccagaatgcttttatggctatggacgacgcctttcggatggccttcagaaccggaggtaaaaaggatcagcgcctcttcttccggctgctgtttaacctgtgccagacgcggcatcagcaaatgagcgaagatccatactttgtcggcagtggtgacatctgcttttaaatcttccagatagacccagcgcacctgagtaagttgctccggcagatgccagagtttgcctttatcgagaaactggcgggaagtgaagatggttttgatttcagccgccgtaatagcactggtcagcccttttaccccggcagtgtagttcatcattgcgggcatgcggcgacgggcgatggccccaaaaatcactgccgcactgatgcctgcattgggcagcattaagccgatgcgttcgccttcaacactgtatttttcaaggatgcgtccaacaaacagcgttttcgtaagcaatttgcgataggagtctggggtaaagttgacgtcttcgacacatttcttcccggctccgaagcggtacattgcactcagtaaagattcgtacagcgtttcacgcgggcgcaccgccattcgcgcttccatcattatttgatgcagcatttcgccagcgattttgcgacggtcacgggcacgcggcgcatccggcatcgccacctgcgttggtggcaaaatatgcagagtaatttgcgggaacaagcgacgtttaaccagacctttcaggcggctgaagtgcgtaagttccgccccttcaatacgcacaggaataaccgttgcaccagacttcgccgcgacaaaacccgcgccatcgtagattttcatcaggctgcctgtcgtggtgatgcgtccttcagggaaaatcaccactggtcggccctgttccaccagacgtaccagatgtttaatagccataggttgcgtcgggtcgagaggaacaaagtcgataaaacttttcagccaacgcatataccactgttggcttatactggtgtaaacggcaaacactggacgcacaggtaaaaacagtccaagcaaaatgccatcaataaaagagacgtgattaggcgtaattagaacgcgctcgcccttcagtgcctgggtgtcacccgtaacgcgaacgcgatacaaaacacggcacaaatttcgaaaaaagctaaaaagcattccaactccctttgctctgattcagtaaaagcgaatggagggagattacacgagataaagaacgcgagcgacagtaaattaggtgcgaaaaaaaacctgcgcatccgcgcaggttggtgcaagagacagggtacgaagagcgtaccgaataatctcaccaatcaatacctctgggatcttgattgtggtctgcacgacgactcttcgccagcgagaaaacgcaaaggaatgaagggaaatgcaacgaggtgtgtaaattgtcggttactgttacagattgatgaccggcaaaaaaaacctgcgcatctgcgcaggctggtgtaattcatgtgctcaacccgaagttgacttcacctatcaatacctctgggatcaccactttagcaacctgaagccaaacgccaccagcggtcaatcgcaacagcgtttcgcaaagtgtaaccaaaggtttgcaatctctttttttgtcttacttatttgcgtttggctcacattcccacgatgaaaacacgccaccccttgaaccaacgggcgttttccgtaacactgaaagaatgtaagcgtttacccactaaggtattttcatggcgaccataaaggatgtagcccgactggcaggcgttagtgtcgccaccgtttcccgcgtcattaataatagtcccaaagccagcgaagcttcccggctggctgtgcatagtgcaatggagtctcttagctatcacccgaacgccaacgcccgtgcgctggcgcagcagaccactgaaacggtcggtctggtcgttggtgatgtttccgatccgtttttcggtgcaatggtgaaagcggtcgaacaggtggcttatcacaccggtaattttttattgattggcaacggttaccacaacgaacaaaaagagcgtcaggccattgagcaactgatccgccatcgctgtgctgcgttggtcgtccatgccaaaatgatcccggatgctgatttagccagtttaatgaaacaaatgcccggtatggtgctgatcaaccgtatcctgcctggctttgaaaaccgttgtattgctctggacgatcgttacggtgcctggctggcaacgcgtcatttaattcagcaaggtcatacccgcattggttatctgtgctctaaccactctatttctgacgccgaagatcgtctgcaagggtattacgatgcccttgctgaaagtggtattgcggccaatgaccggctggtgacatttggcgaaccagacgaaagcggcggcgaacaggcaatgaccgagcttttgggacgaggaagaaatttcactgcggtagcctgttataacgatagtatggcggcgggtgcgatgggcgttctcaatgataatggtattgatgtaccgggtgagattagcttaattggctttgatgatgtgctggtgagtcgctatgtgcgtccgcgcctgaccaccgtgcgttacccaatcgtgacgatggcgacccaggctgccgaactggctttggcgctggcggataatcgccctctcccggaaatcactaatgtctttagtccgacgctggtacgtcgtcatagtgtgagtactccgagcctggaggcaagtcatcatgcaaccagcgactaaccgcagttaaagcaattccagcgccagtaattcttcgatggtctggcgacggcgaatcaaccgcgcctgaccattatcaaacagaacttctggtaacagcggacggctattgtagttggaactcatacttgcgccatatgcccctgtatcatgcagtaccagataatcacctgccttcacttccggcaaggcgcgggtttcaacatttcccccttcctgctgggtaaagacatcgccgctttcacataacggtccggcgacgacggtttccaccgttggcgcgtgttccagagaacgaccatcagctgccagggcactgatatggtggtaactaccgtacattgccgggcgcatcagatcgttgaacccggcatcaaccagcacaaagtggcggctccccatttgtttgacgctccgcacctgagtaattaatacgccagactgcgctaccaggaagcgacccggttcaatttccagtttcacagggtggcccaaatggcgggcgatttgctcacgcgcggcattccacagaccataataatgttcggtatcaaccgcctcttcaccctgttgataaggaacagaaagcccaccgcccgcagaaatagcctgtaaatcctgaccgaattcgatgacctgacgcaccatagcaccacacacctgttccagatgggcataatcaacgccagaaccaatgtgcatgtgaatgccgaccagctgcagatgatgacgttgtatcacgtccagtgcggcgggcagatcggtgtaccagataccgtgcttgctgttttcgccaccggtattggttttttggctatgtccgtgaccaaaccccggattaacgcgcagccatacccgatgccctgggctaacctggcccagttggtcgagcatatcaacagaacccgcattcaccggaatttgcaattcactgacgcgttcaagcgtcgcctgatcgataacatctgccgtaaaaacaatatcatcggggtgcgtttgcggattgtaacccgccgccaacgcacgctctatttcgcctaagctgacggaatccactttcacgccctgctcacgcattaagcgcaaaatatgaatattggaacaggctttctgtgcaaagcgcaccacatcaaactgtttcagcgctgcaatctgccgacgaataatttgcgcatcgtagacccacaccgggcagccaaattcagcgggcaaacgcagcagattttcggcggtgagatcggtatcggtgctgaacagactatgtggcataacaaactccagataagtgcttttttatgattacgccacatcataaaaagaataaaaaatatcgatttatgtcgagtctatgcaaaaatgatatggattaccggattgcgagagagcgctaatggccgccgttaacttacgtcatattgaaatttttcatgcggtaatgaccgccggaagcctgactgaggcggcacacctgctacacaccagtcagccaaccgtcagccgcgaacttgcgcgctttgagaaggtgatcgggctgaaattgtttgagcgcgtacgtgggcgattacatcctaccgtgcaaggactgcgtctgtttgaagaagtgcaacgatcctggtacggactggatcgcattgtcagcgccgcagaaagtctgcgcgagtttcgccagggagaactgtctattgcctgcctgccggtctttagccaatcttttttaccgcagctcctgcaaccctttctggcacgttatcccgatgtcagcttaaatatcgtgccccaggaaagtccgctacttgaagagtggctcagcgcccagcgtcatgatttaggactcactgaaacgctccatacgcctgcgggaacagaacgtaccgaattactctctttagatgaagtgtgtgtgttacctccgggtcatccgctggcggtaaaaaaggtattaacgccggatgattttcagggtgagaactacatcagcctttcccgtactgacagctatcgccagttgctggatcagctatttactgaacatcaggttaaacgacgcatgatcgtagaaacccacagcgccgcgagtgtctgcgcaatggtacgggcgggggtaggtattagcgtggttaacccgctcaccgcactagattatgcggcaagcggtttagtggtgcggcggttcagtattgcggttccgttcaccgtcagcctgatccgccccctgcaccgcccgagtagtgcgctggttcaggcgtttagtgggcatttacaagcggggttaccgaaactggtcacttctcttgacgctattttgagcagtgctacgacagcataattagctcagcataaaagcgacagcatcctcggcatggatcgccgcggtatcaaacacaggcaaaacactgcgctcttctggcaccagtaaaccaatttctgtgcagccaaaaatgacgccctgtgcgccctgttctgcaaggcgagcaatcacttgcgcacaataagcgcgactcgcttcggtaaattgccccagacacagttcttcaaaaataatctgattaattttcgcccgttcatccgcttcaggaataagacaattgatggaaaattgttccgtcagccgcccgcgataaaaatcctgttccatggtgtaacgcgtacccagcagcgccacacgagtcattccggccccggtaattgcacgtccggtggcatccgcaatgtgtaagaaaggcagagtgcaacgactctcaatggcatccgccactttatgcatcgtattggtacatagcacaataccttctgcgcccgcccgctgtaagccaagcgccgcctcagccagaatgtccccggttttatcccattccccgcgacgctggcactcttctatttcatgaaaatcgacgctatgtagcagcacttgcgcagagtgaagcccaccaagccgctgtttaatgccttcatttatcaaacgatagtaaggaatggtggattcccagctcattcctcccagcaaaccaattgttttcattcctctctcctgatgtgtgttaccgcaacaaggctgaataaggaacgagacaaacgcctcaacggccaagtgcccaatctctattaacgaaaaaagggccggatgtacagcacatccggcccgtgaaatcagacgccgatatttctcaacttctcgcctgccatcagtttgcgttcgatatgttccagcgtgacatttttggtttccggaatgagccagaaagtaatgcccacaaacgcaatgttcagcgcagtgtagagccagaacgtaccggcagcgccaatgctatcaagcagtgtcaggaaggtcgcgccgataatcatattgctcacccagttcgtggtggtgctacaggtaataccgaaatcgcggcatttcagcggctgaatttcagagcacaggatccacaccactggcgcggcgctcatcgcataaccggcaatacacatcatcgtcatgccaacagagagccaggacaagccactggaagccgtaccgttatcaaactgcatcaggcaatagcccagcaccagagtgcctaacgccatcacgctgaaaccaattttcagagccggtttacgccctgctttatctaccgtaaacaccgcaataaaggtggcgaacataaaggtcagccctacgaccagagtcgcaatcatctgttgttctgtggtcgtaaagcccgccattttgaagatacgcggcgcgtagtacatgatgatgttcataccggtaaactgctgcatcgcctgcaacaacataccgagaaacacagcacgacggacgttacggttgatcttaaacagtgcccaaccgccctgttttaacttcaggctttcacgaatttcgttgagttcttctcgcgctttttcgctcgtatcgcgcagcatacgcaatacttcttccgcctcaatatgacgccccttttccgccagccagcgcgggctatttggcaggaagactaccagaataatcagcagaactgctggtaaagcaagaacccccaacattgcgcgccagttaccgctataactgaacgctgtatcggataaaaacgccagcacgatgccgagtgtgaccatcaactggtacatactgatcatcttaccgcgaacgttttcacttgccatttcagaaagatacagaggagcggtgtaagacgcgatcccgacagcaatgcccagcaccacacgagcggcgattaacatctctacgctggtcgcaaaagcggaccctatagaaccgagtacaaacaggatggcccccgccatcaggctgtatttacgccccaggcggaagctcagccaaccattaaacagcgcaccaattgctgcaccgagcatcatgctactaaccacccattcctgcaaacgactggtcagcacaaagtgatcggtaatgaacggcaacgctccggcgattacgccgatatcaagaccaaataacaatcctgcgaccgcagcagctacgctaacaaacatattcatacgccgcgtatcccgcaaagaacgtggcgttaaagcagattccgtattgatagtaaccattttttcctgccagcagagagtaagacatagtgaaaaaatacgtgaacaactcacgcaggtgtcaggtcggaaacagcataaatatggattaaattgctgcgacatgtcgttatgtgatggatattccaattttcaaattaagttgaattattgagattattattaaccacctaattttacagcagataaaattcataaagttcattaattgataattaatatggattatttcataaccatgatatggattatgatgatctacaggtataaaaaaccctgccatgcggcagggtcataaaagtaagaagaatgaattaacgcgccagccaaccgccatccacggcaatggtataaccattcacataatcactagcgctggaggcaaggaacactatcggccccatcaggtcactcggcagtccccaacgaccagctggaatgcggtcgagaatttccgcgctacgttgttcatctgcccgtagttgttgagtattgttggtcgccatgtaacccggggctatcgcattaacattaatgttgtgtttagcccattcgttcgccatcaatcgcgtcacacccatcacgccgcttttacttgcggtataagaaggcacacggatcccgccctggaaggagagcatactcgcgatattgataatcttgccgccattgccttgcgcgataaagtgtttcgccgctgcctgagacatgaagaatacgctcttgatattcaggttcatgacatcgtcccagtccttttcgctgaactcgagagcatcttcgcggcgaatcaatccggcgttattcaccaggatatcaatatgaccaaactccgctaccgcgcgatccagcagtgctggaataccatcaatctttcgcagatcggcggtcaggcttaaaaaacgacgccccagcgctgtgacctgctcgatggtttcagtcggttcaacgatgttaatgccaacaatgtcacagcccgcttgcgccagccccaacgccatcccctgacccagtccagtatcacaaccagtgacgaccgcaactttaccttcgagagaaaatgcacttaaaatcataacaataccttattcgtttatgcccacaattagcgcaaatctttaacggccacatggtccatatcatcaaagacctggttttcaccgaccatgccccagataaaggtataagctttggttccgacaccggaatggatgctccagctcggggagatcaccgcctgctcgttatgcatcacaatatgacgcgtttcttgcggctgccccatcatgtggaaaacgcaggcgtcatcatccatattgaaatagaaataaacttccatccggcgctcgtgggtgtgacacggcatggtgttccacaagttacccggagccagctccgtcagccccatactcaattggcaggtttccagtacatccgggacaaaatatttgttaatcgtgcgacggttactggtgaggttatcgcctaacgtgactggagatacttcgtccggtgtgacttttttggtgggatacgtcgtatgcgcgggtgcgcaattgtaataaaacttcgccggagtgccggtatcaatactggcaaagacaacttcttttgcacctttaccaacatacagggcgtcgcggtgaccgatttcatagcattggccatcgacagtaatcgtaccggcaccgccaatattgataacacctaactcgcgacgttcaaggaaatagcttacgccgagttgtttaccaacttccccgccaacggaaaccgttttagttatcggcataatgccgccaacaataattcggtcaatgtggctgtaaaccatggtgtactcatcggcgacaaataccttttcaaccaaaaattcattgcgcagcccttgggtatccagcgtttttgcgtgcgcactgtggatgctctgtcttacgtccacatcaacctccgataatcagtgaagcgtgaaaatagaaaacgatagtgaaacactgtttcgttttctctataaagggatgatatgcccatgggctagggttttcaattaaaaataaaacaatgtttcatttttaagttaaggattaaaaaaagtgcagtgtcgatcacgaatatgtcatgagaatggaaaaatgagggagcccagaaaatgtatgtcgacttgccagccatcattattcaacagattaatgacggcagatatttatcggtaaggaggaaatgcagagttattcgtcacgttcaatggtcaatgccacaccctggcccccgccgatacaaagcgttgccagtcctttgcgggcattacgtttcaccatttcatgaaccagagaaaccaggattcggcaaccggaagcgcctatcgggtgaccgagtgcgatcgcgccaccattgacattgacccgacgctcatcccactcaagcatcttgccaacgctaagcgcctgtgcagcaaacgcttcattagcctcgataagatcgacttcagccaactgccagcctacacgctccaggcaacggcgggtcgcatacaccggcgcaattcccatcaatgccggatctacaccaacgctggcaaatgcgcgaatgcgggccagcacgggtaaattcaacgctcgtgctttggcttcgctcatcatcattaccgcagctgcgccatcgtttatggaacttgcattacccgctgtcacagaaccgagactatcaaaactaggatttaaacgggctaagccttctgcgctggcgtcagtgcgtggctgttcatcggtatcaacaaccaacgtctgcccgttactttgggtcattaccgggacgatctcatctttaaatcgtccggcgtcaatcgccgctcgcgctttttgttggctgctaagtgcgtaagcatcctgcaactgacggctgatgccatattcgcgagccagattttcggcggtgacaccaatatgataatcattgaaggcatcccacaacccatcatgcacaagactgtcaaccaactggctattgccaagctgtgcaccggtgcggctatcagtcagaacatgtggtgcgcggctcatgttttcctggccaccggcgatgacaatatcagcctcgccacactgtatcgcctgagtagccagatgcagtgctttaagcccggaaccgcaaacgtcattaatagtgattgcagaaacgctattaggcagaccacctttaatagcgctttgccttgccggattctgccctgcccctgcagtcaacacctgaccaagaattacttcatccaccgcatatgcaggaacgccggtacgttctattaacgctttcacgaccagactaccaagttccacggcggaatgacccgctaacgcaccacgaaagcagccgataggtgtccgtaacgccccgacaatcacaacgtctttcatcacaacctcgcaccaattaacagtgcaatagtaaatgattgttaattacagttatcttaattgtttaaaaaaagtgatttttatcacaaaggaaatatgcctgagcagcagtcagagacataactggcacgtaaggtttgcaaccactaacccaccaatagaggggtagatagggcgttaatctcccatacttaacctggtttatggtaaattgccctccattttgtttaatttgtagatgatacgttcagataatgtctaatatttggtctaaagaagaaactctgtggagtttcgcgctctacggcacagccgttggtgcaggcacgctcttccttcctattcagttaggtagcgcaggggctgtggtcctgtttattactgctctggtcgcctggcctttaacatattggccacataaagccttgtgccagttcatcctcagtagtaaaacaagtgcaggtgaagggataacgggcgcggtaacacactactatggcaagaagattggtaatctgattaccacgctgtacttcatcgccttttttgtcgtcgtgttgatatatgcagtggcaattaccaacagtcttacggaacagctggcaaagcatatggttattgatcttcgcatccgtatgttggtgagtctgggtgttgtattaattctgaatctcatttttctgatgggacgtcatgccactattcgggtaatgggatttttggtattcccattgattgcctatttcttatttctttccatttaccttgtcggtagttggcaacctgatctattaacaacccaggtagagttcaatcagaatacccttcaccagatatggataagcattcccgtgatggttttcgcctttagccatacgcccattatttctacgtttgccatagacagacgtgaaaaatatggcgaacacgctatggataaatgcaaaaaaattatgaaagtcgcttatctcatcatctgcataagtgtactgttctttgtctttagctgcctgctttctattccacctagctatattgaagctgctaaagaagaaggggtcaccattttaagcgcgctttctatgctgccgaacgccccagcatggttgagtatttccgggattattgtcgcagtagttgcgatgagcaaaagtttcctgggtacgtactttggcgttattgaaggtgccacagaggtcgtcaaaacaacactacagcaggttggtgtaaagaaaagtcgtgcatttaaccgcgcactaagtattatgttggtaagcctgattaccttcattgtttgttgcattaacccgaacgcgattagcatgatttacgcgatcagcggcccgctcattgccatgatacttttcatcatgcctacgctgagtacgtatctcatcccggcgcttaaaccctggcgttccatcggaaatctgattacgctgatcgtgggtatcctgtgcgtaagcgtaatgttctttagctaatatcagttgtggatggttcaaaattgctacaattttgaaccattccatttttcataatattcatttgttattattccaccctatcacttctctcgtcatatcctagtattatcagttagttaaacacacaaagagatctgaacatcttaaataagactatttaagatgcataacttagattcgcaagatatcttctggtcattcaaaaacaatttgcgatatagatattcttataccatgagatagttatctggaccgctctcaaccatgcaagattaaatcagtgaaacataatcatatttgataacgagaaatgcatttttaaatgccttactcagaattatagcaaatacagattaatcgcaatttttcccggcaaaattacaaaatcatggtgtattgacatcatcaataaccaatgaaattatgcaattatatacggatagggaggttcttaacatggggctttgtagtcgttataaaagtcttacatgcaatagttgcagtatgcattgccaaataatgccagaagagagtccgcgtttgcagtattgcgcaaacagctgtttttgtatgtggcccgaagaaagtagttattttaatcgtggtgtggtagaaggtatcttaacaaaaaaccacaatgcgagattaagcggatatatttttgtcgattttagtgtaagttttttacgtctattccttgaaaaagactggattgactatcttgcaagtactgacatggggattgttttagtcagcgaccgcaatatgcaaagcttagctaattactggcgaaaacacaacagtgcaatatctgctgtcatatataatgatgatggtcttgatgttgccaatgaaaagatcagacaactatttattggtcgttatttaagttttaccggaggtaacacattaactcagatggaattcaccataatggggtatatggtttctggttataatccatatcagattgctgaagttctggatatggatatccgtagcatctacgcgtacaagcaacgaatcgaaaagagaatgggtggtaaaataaacgaattatttattcgtagtcatagcgtccaacattgatactcaacgaccagccagaatcatactctgtttatacgggcatttattgaaatgtccgtattttataaataggccgtcccctcaagagtaaacaccatagtatttaaaaccatcacacgaaaaattcagaagcattacgaaatatgaatttacaaacaatagtggcataaatgttaaccatgttaatttacgtaaagttttacgttgcaacattaaagcctcatttcaatcatcatgataaatataaaattaatatatatttatgccgtaaataccaatatacttagcaaactatgtgatctccatttcgattgatttagtgtttattgacgtatgtactggattattaacgataatatcgagttctggcctgagcaccgaaaattaataagcgtacataacgccgatcttaacgtcgttctgacaacgccagccagtcgatgtttaagtcttctacttgaagcttttcctgatgtggttgcacaacaagattttttcaccagagtctgggaagaagaaggtatgcgtgtgcctactaacacgttatatcagaacatatccattatcagacgcggatttcgcgctgttggtgatactacccacagcctaattgcaaccgtgccgagaagaggattcaagatccataatgacattaacatacaaaatcatgtaataaacagcagtacagacgcacatacacacaatgccccacctgccataaaagttaatgcgggatacaaagagagcattggtggcgcaaagaatttcaataacaaaatcctcaaacatataaaaagtcatctaattatgttgagcgcatttgtcataggcgcatattctgcatattggctatggaataataatcaaccgaagccatttttcaaggattacaagactgttgcggaaattaatggctgccattttaatgtaacagaagatacaattgatgggttgaaagagttcgataaatataaaacacggatactggatagcgggattaactgtaaaaaacatccgtggttatacttccctcttgcaaaatccagtccggggatgattgttatggcatgcaataaaaactataaccaacatgaagtggcaaactgtttaaccctgtcttaccgtgaggttaatcgtgattgattataaaaaaaacttattatttattttagtttttatcagtgggtttattctcttcactgtctattcttacactgcagaaaaaatgatatataacgaaacatgcactgcaaattgggtaatttttaatgaccagggacgagcaaatcttaccatcgactttatgtataacaaaaaaaataaaacaggaactgttgcgttgagtggaacctggcaacaaggtaacagagaaagtaaaagtatacggcgaaatattgaatacacatggattgaaaactatgacacagcccatttaacaagtaagaaagttaataagtttgagattatggatcaagttgatgatgatagacttgcacaacttattcctgatttttatgtctttccagaaaaaagtgtaagctataatatactaaagcaaggtaagcatgcttttattttgagcattggtaacagagcaataatgcattgtgcaaggtaaactaaaatagataacaaaaagatggaacctcgttaatcataaaacaataaaattaaatattctcgcagtatatggcagtctaaagcatcaaagatttgatcaacatctttcattttagacatctccttgcaatgtaaaatatcatgtatcaacaacatctggtgcaaatccaactgtcgaactcgacattcatcttagctcgattattattccttcgtacagtgcttgtaaacaatacagaaagaggattattaagaaccagtttactcagactatcaatagaggaaaggactaacgtttctttaaaagaattgatttcatcatctgttaaactaaactcatcattgacagatcgactgatataactgtttttaactttactctttacgttgactttattgacagaattaacattcacatatctactatttaatgtccaacttgttgtttgcgtgagaacattctcagcattaaggaatttttttaacggaatccttggtttctttttgctgtcgctatttacaatatcatgcatatagaccatttcatgaatctggctaaattcaatgtccattgtatacctcacatttttaccgtgactcgatgttactgttcaataatcaccttccatcaatactaaaattaatacccctaatgtgccgataacaaatatagtcattctacgtaacgtctccataaggtgatatttgacattatcagaagctgcgaattcggattttgctctaatcaaatgagagaaatgtaaaatgaagccacgaaatattaataatagcctaccactgcaaccattagttcctgatcaggagaacaaaaataagaaaaatgaagagaaatccgttaatccagttaaaatcacaatggggtctggtttaaattatattgaacaagaatctcttggaggaaaatatctaacacatgatttgagtataaagatagcggatatttctgaagagataattcagcaagcaatattatctgctatgagcatatataaatttagcataacagatgatttaatgagtatggctgtaaatgaactcataaaactgaccaaaatagagaataatgtagacctgaataaattcactactatatgcacagacgttctatccccccgcgtcaccagacataataaagaaaaaaacaaacgacattctacccttctcaaaaatcccctttttaattttcattgaaaaaatggcaattgatactatgaatccaggtcatacacattaaggcatttatgtaatgtcgtaattaagataactaataaggtgaatattagtaaaacaactaatgatgttattagtttgtagtgaacagtacttttaccaataatgaaaaatataccataagcaatgcaagcttaaaactcataatttaaaaaagataaatataaaaatatcaatgagtcaatcaataataatttggcatcacgagacacatcacagaggaatattatgagcacagaaacaattgaaatattcaataatagtgatgaatgggcaaatcaactaaaacacgcattaagcaaaggagaaaatctggcattactacatggtttaactcctgatatccttgatagaatatatgcatatgcattcgactaccatgaaaagggtaatataacggacgcagaaatttattataaattcttgtgcatttatgcgttcgaaaatcatgagtatctaaaagattttgcaagtgtatgtcagcccaaaaagaaatatcaacaagcatatgacctttacaaactaagttacaattacttcccgtatgatgactatagtgttatttatcgtatgggtcaatgtcagattggggctaaaaatatcgataacgcaatgcaatgtttctatcacattattaacaattgtgaggatgatagtgttaagagtaaagcgcaggcatatattgaactcttaaacgataatagtgaagataatggctaagcattacaatcatttggttaaatttgctggttatagtgcagttaaccactataaccagcacctcttatgttttcttaaatcagcatcttaaaacagttaagagcatactataaatcattatttttcaatgcgttagagaacaatctactttatcaaaattgaataaggctatttcagattacatcactgaattcctaagataaattagtgaacacaaccatagatatgtcaaatgtaatttcctgtagcgttaatgacacataaatatgaatagccataatttctattgcttaagcaggatgcaagaaaccaattttttcatagaggttaactaatggacttagaaaataaattcagttatcattttcttgagggattaacgctcacggaagatggaattcttactcaaggaaatgagcaagtttatattccacagaaagagttaggtgtattaatagtattacttgaatccgctggtcatgttgtactgaaagatatgatcatcgaaagtgtatggaaaaatattattgttagtgacgagtccctgacaagatgtatctattctttgcgctgcatttttgaaaaaattggctatgatcgttgcatagaaacaatctaccggaaaggttatcgtttcagcgggcaggttttcaaaactaaaattaatgaagataatactagtgactattccatagctatattccctttcactactagtttgaatacactggatccattaatacttaatcaggaattagtgcaaatcattagtaataaaaaaatcgatggtctctatacctatccgatggctgcgacaaatttttgtaatgatcacatatctcaaaatagtttcttgagcagattcaagccagattatttcgttacaggaagaataaaccagaataatgcagtgaacactttatacattgagttgatcgacgctaaaaaccttttcctcatcgccagtaatcatctccctgttgatgaactacataatacaagtcaatttattatagataatatccttcaaacggtacataaaccagaacgatctgtaagattagctaagcaggaccaaggatataagaatcattatttaagtgatgaaatgttagccggaaagaaagaactttacgacttcacccctgaaagcatttacagggccatgactatatttgatagattacaaaataaaagtgatatacagacgctaaaaacagaatgttattgccttctagcggaatgccatatgtctttggcacttcatggaaaaagtgaacttgaacttgctgctcaaaaagcattagagcttttagattatgtaagtgacataaccactgtcgatggaaaaattttagctattatgggactgataactggtctgtctggacaagcaaaagtatctcatatcttatttgaacaggctaagatacacagtactgatatagcctctctctactactatagggcactagtccactttcataatgaaaaaattgaagaggcaaggatttgtatagacaaaagtctacaactcgaacccagaagacgaaaagcagttgtgataaaagaatgtgtagatatgtatgtgcctaacccgctcaaaaacaacattaaactctactataaagaaactgagagtgaaagccatcgagttataattgacaacattttgaaattaaagcagctgacgagaatttgtatgcgataaatttttattgacgcaattttattatttagatgtatgcaacttgttatttaaacaacagagataaaaatatctaagatattcaccttattgcaagatatttaaaatgctctagagttaaaagtatgatgtaaagaccattggcctggacaattaaaaaagggagctttatgactaatccaatcggtatcaataatttatctcaaagtagtaatatagcgaatgcaacgggtgatgaagtcgtaagtttagataaacacatcaacaccagtgctactgatacagatcaaatacaagcatttatagttagtacatggatggcgccttttcaaaatgatatgtatagtgaagataatcctatcagtccttactataaaattgagtggtaaacgattgaccaaataaatcataacgagatacttttataatagtatctcgttcctttcattcaatcctcacacatgaaaaaatatgcgctcaccaaaagttaaattcttaaccatcttcacgttttgtatatttattacaaaaatgtctttcgccagcaactcttgctctaatgaagcaggaacaatgttcagaatcgaaccaaatttaattaaagctatcgctcttgttgaaagcaatctaaaaaaggatagcataggcaagaacagagataagaataacaatataaagagtttagattattggttaatgcagataaaccagatgcatattcccctgttaaaaaaacgtggaataataaaagatgaacgagatttgttagataacccttgtctgaacattaaaataggaaccgagattttatataaccattttagtcgttgtggagtaacgtggcaatgcctggggacttataatgcgggttttgcaatggataaccaaaaaaagagacagcaatatgccccaaaatatatattgtatataccaggcttaatgaactaaacaatcgtaaggcttcagcaaaatgagcctaaagcctcttttttttatatagtgcaaacacccatacgtaaagctgttttgatcaactcgataccactgtgaacatctaatttcttcatgatattgagtctatgagtttcgactgttttcctgcttaactgcaagaaattagcgatttctttgtttgttttaccatcagctatgagttgtaatatttcactctcacgatttgtaagttgattatcagaggaatacctggaagatattttttcacaatccatatgtacactatcaaaataagtgtaaccattactaatgctatcaatagcacgatttagtttcgccgggtgactggttttccatacgcatcctttcgcacctgcttcaagcaattttatactatcaatatacggcatctttgctacaaatgtaataatatgagcatctatcttatggcttttaacccattttacgagttcggcccccatcattccacctgcaaattctcctaaaataaatatttaggctgtagatttgttacactccgctatagctttcttcagatctttatagcccacttatttaacaacttgaaaataaggtgttttacctgggttgttacaaaaggattgcattgcgtaaacgctttttatttacaacaaaatggggaagtattacggcgaagataaattggagcgggcgaagggaatcgaaccctcgtatagagcttgggaagctctcgttctaccattgaactacgcccgcttcgagatgcgtaaggcattataaaccttacgctctccttagcaagtgccacgctgctgactgctgattaattcgccatcagcattttggcttgctgccctgaggcggcaagtaacgtagcggatcaattgccgttgcacggtaacgaatctggaaatgcaggcgaacagatgccgcatccgtgctccccatagtggcgattttttgcccagccttcacgctttgcccattatttaccagcatcgtgtcattatgggcgtaagccgtaatgtaatcttcactgtgtttaatcatgatgagattaccgtagccacgcagctggttgcccacatacaccacctttcctgcacccgcggcgtaaataggtgtaccccgtggagcactgatatcaatccctttattgccgccatctgctgtgctatacggcatgataactttccctgtcgttggccataaccaacaacgttgccctactggcggccaggaacttttcggtaccgcactactcggtgtaacgcttgcggttttggtcgtacttttggcggtacttttacgtgtaatactgctacttttcgccccacccagttttagtttctgaccaacttcaatggtgtaagggggggaaatgccgttcagtcgcgccagttcttttacgctggttcccgtggtgcggctaatacgatatagcgtatccccccgtttcacggtgtaaacggagccggaatacgttcctgtatcggaacttttgctaccgctacagcccgccaaaagcagtccaacgcttaacaacatcacgatacccagagattttttattcaggcgtcccgcactcaaaatctttcctcgcttaaaaaacaagacgccttatcatagcagccagcctcttgatacccaatctcttgcttctggaaaaacgtggtaatagagaaagaggttaatttcatttggcaaagggaagtatcatcagcaaaatattcgctgtagaggtatcgaacttcctgactttttaccctatttcccatcctgatgcgtaataatcccaatttatcacattgattttatcgccactcatattgatacgtatcactgcccctattcagagtcctgtttcgtatcatatctgtgtttttttaacgtcatcacacttcctacctcccctaacgcttatcgtcgtttctggcgtaaatcttgcctgcttagactaaatctttgccataagaaccaaatgttcaaatcgaggggatttctatggaagcgcgggaagcaaccgctacgggtgaatcatgcatgcgcgtcgatgccattgctaaggtcaccgggcgggcacgatatactgacgattatgttatggcgggcatgtgttatgcgaaatatgtacgtagccctatcgcacatggttatgccgtaagtattaatgatgaacaagccagaagtttgccgggcgtactggcgatttttacctgggaagatgtgcctgatattccattcgctacagctgggcatgcctggacacttgacgaaaacaagcgcgataccgccgatcgcgcactgctaactcgccatgttcgtcatcatggtgacgccgttgccatcgtcgtggcccgcgatgaactcacggcagaaaaagcggcgcaattggtcagcattgagtggcaagaattacccgttatcaccacgccagaagcggcgctggcagaagacgctgcaccaatccataacggtggcaatttactgaaacaaagcacgatgagcacgggtaatgtccaacaaacaatcgatgccgccgactaccaggtacaggggcactatcagacccccgttattcaacattgtcacatggaaagcgtaacaagcctggcgtggatggaggatgacagccgaattaccatcgtttccagcacccagatcccgcacattgttcgccgcgtggttggtcaggcgctggatattccctggagttgcgtacgagtcatcaaaccatttgtcggtggcggttttggtaataaacaggatgtactggaagagccaatggcggcattcctgaccagcaagcttggcggcattccggtgaaagtttcccttagccgtgaagagtgtttcctcgcaacccgtacccgccacgcttttaccattgacgggcaaatgggcgtgaaccgcgacggaacattgaaaggttatagtctggatgttctgtctaacaccggcgcttatgcatctcacgggcactccatcgcttctgcgggggggaataaagtcgcttacctttatcctcgttgtgcctacgcttacagtagtaagacctgctataccaacctccccagcgctggtgcgatgcgtggttatggcgcgccacaagtcgtatttgccgttgagtctatgcttgatgacgccgcgacagcgttaggtattgatcctgttgaaattcgtttacgcaacgccgcccgcgaaggagatgctaatccgctcacgggcaaacgtatttacagcgcagggttgccggagtgtcttgaaaaaggccggaaaatctttgaatgggaaaaacgccgtgcagaatgccagaaccagcaaggcaatttgcgccgcggcgttggcgtcgcctgttttagctacacctctaacacctggcctgtcggcgtagaaatagcaggcgcgcgccttctgatgaatcaggatggaaccatcaacgtgcaaagcggcgcgacggaaatcggtcagggtgccgacaccgtcttcagccaaatggtggcagaaaccgtgggggttccggtcagcgacgttcgcgttattagtactcaagataccgacgttacgccgttcgatcccggcgcatttgccagtcgccagagctatgttgccgcgcctgcgctgcgcagtgcggcactattattaaaagagaaaatcatcgctcacgccgcagtcatgctacatcagagtgcgatgaatctgaccctgataaaaggccatatcgtgctggttgaacgaccggaagagccgttaatgagcttaaaagatttggcgatggacgctttctaccaccctgaacgcggcgggcagctctctgctgaaagctccatcaaaaccaccactaacccaccggcgtttggctgtacctttgttgatctgacggtcgatattgcgctgtgcaaagtcaccatcaaccgcatcctcaacgttcatgatagtgggcatattcttaatccactgctggcagaaggtcaggtacacggcggaatgggaatgggcattggctgggcgctatttgaagagatgatcatcgatgctaaaagcggcgtggtccgtaaccccaatctgctggattacaaaatgccgaccatgccggatctgccacaactggaaagcgcgttcgtcgaaatcaatgagccgcaatccgcatacggacataagagtctgggtgagccaccaataattcctgttgccgctgctattcgtaacgcggtgaagatggctaccggtgttgcaatcaatacactgccgctgacgccaaaacggttatatgaagagttccatctggcaggattgatttgaggataacatcatgtttgattttgcttcttaccatcgcgcagcaacccttgccgatgccatcaacctgctggctgacaacccgcaggccaaactgctcgccggtggcactgacgtactgattcagctccaccatcacaatgaccgttatcgccatattgttgatattcataatctggcggagctgcggggaattacgctggcggaagatggcagcctacgtatcggctctgcaacgacatttacccagctaatagaagatcctataactcaacgtcatctcccggcgttatgtgctgcggccacgtccattgctggaccgcagatccgtaacgtcgctacctacggtggaaatatttgcaacggtgccaccagcgcagattctgccacgccaacgctaatttatgacgcgaaactggagatccactccccgcgcggtgttcgtttcgtcccgattaatggctttcacaccgggccgggcaaagtgtctcttgagcatgacgaaatcctcgtcgcctttcattttccgccacagccgaaagaacacgcgggcagcgcgcattttaaatatgccatgcgcgacgcaatggatattagtacgattggctgcgccgcacattgccgactggataacggcaatttcagcgaattacgcctggcatttggtgttgccgcgccaacgccgattcgctgccaacatgccgaacagactgcacaaaatgcgccattaaacctgcaaacgctggaagctatcagcgaatctgtcctgcaagatgtcgccccgcgttctagttggcgggccagtaaagagtttcgtctgcatctcatccagacgatgaccaaaaaagtgattagcgaagccgtcgccgcggcggggggaaaattgcaatgaatcacagcgaaacaattaccatcgaatgcaccattaacgggatgccttttcagcttcacgccgcaccaggcacgccgctcagcgaattactccgcgaacaaggactgctaagtgtcaaacaagggtgctgcgtgggtgaatgtggtgcctgtacggtgttggtcgacggcacagcaatagacagttgcttataccttgccgcctgggctgaaggaaaagagatccgcacgctggaaggtgaagcgaaaggcggaaaactttctcatgttcagcaggcttatgcgaaatccggcgcagtgcagtgcgggttttgtacgcctggcctgattatggctaccacggcaatgctggcgaaaccacgcgagaagccattaaccattacggaaattcgtcgcggactggcgggaaatctttgtcgctgcacggggtatcagatgattgtaaatacagttctggattgcgagaaaacgaagtaaaaggatatccggcctgaattcaggccggattcactgaggttatgtgtttaacaactcatatttcttaatcttgcgatagagcgtagcaatgccgatgcccagttcatcagcaacttgcttcttgctgttatgacgactaagcgcctcgcggatcatttgcttttccatctcctccagcgccgtgccgcccgcatcatcgagactcaggtgcgcctcactgacctctgttacatcactttgctccgttgtgccattattcagcagatttggcggcaatagcgtgctgtcgataacttcaccactaggaaccacgttaaccagatattccatcaaattgcttaactcgcgcaggtttccgggccaacgatgcttacgcaatatttcgacgacatcgggagcaatgccaggataaacgcttcccagacgacgggtatgcagatgtaaaaagtaatgcaccaatagttcaatatcttcctgacgttcacgcagcggtggcagagttatcgggataacattaagtcggtagaagagatcttcgcggaatttaccttcggcaatgaactgggccaaattctgattagttgcagaaatgatgcgaatgtcgacttgtattgggctactggcaccaatcggcagaatttcacgtgcctcaatagcgcgcagtaatttagcctgcaacattaatggcatatcacctatttcatcgagaaacagcgtgcccgtattcgccgcctgaatcaaccctgttttaccgttggcagaagcgccagtaaatgcacctttaacataaccgaacagttcgctctccagaagctgctccggaatcgcggcacagttgatagcaataaagggtttattccgtcttccgctcaacttatggattgcacgggcgacgacttctttacccgtgccgctttcaccaaccaccataacgctggatgggctgggtgcaatacggctaatgagtcgttttaattgccgcataacacggcactcgccaaccaattgttcaatatgcggttcatcaggtgcatttgctacagaaaaactggtatggctttggtgaaacgccattaaaaataattgtcggccctgaatgttatgcaattgaccaatgattaattcacttttatcgtcccaactaacaatatgctgcatatgtccatgggtaaaattactctcaaatgttaatggtctgaaacggataggtttcccaataatattattttgcacaacaccaagtgtttttaaggcagtctgattaacaaactgaacccgattttcatcatctacaactaatacgccctgatccatattatcgatcatggtcgcaaatattttactgatgttatctcctggcccctgatcctccagaagtttgctaacaaaaatggtggatatatggcgaacataatcagaaaattcgcgtaaattatcactgatatgctcttgttgctcgtgggtaacggcaatcaaacttatcaccccaacacaacgatcctgtaaaatgacaggcgtacccagaaatgctttttcgcggcaattttctttactatcgcaaccttcgcaaaggggatcgaagcgagactgtgtcacaactttttcagttttcgtttccaggacgtggcggagcaggcgactgttgccgctcaactggcgaccaagaaacttcccatacgcgcccgttccggcaacgcgacacaagttttcatcaacgatctcaacctcaagctgcaaaaacgctggcaagcattctggcaaaacgctgaattgtcggttgaatttgcatcaatacactctgcgtagtagcaagctccatagctttaccttccagacttacttaaaagtcgatcattgaagacgttgatggttcacagatcatgatgatattaactcaggcgaaattggctttgataaaaacataagatttttatcattttctaatgaaattatggaagagatatcacatttctatatcaatatgagaattacggcggtgagtttatcaaactgaagagagatagcctgcccctttatcttatttctgatacttagcagcaaataaataacgcgataaaaaaagccaaacgttttcgtattttacaaacaaccagaagctggcatcaatttgtgatcaaccccacacattatccgtcaaattagtcttttgcagccgcgcggataattctggcacacttattgttagtcccaggtatagctgtgaaaacaccaatcactttggcaagtcacagtgaaataaaccactttgcctgtcattccactaccgggactttatgatgaaaactgttaatgagctgattaaggatatcaatagcctgacctctcaccttcacgagaaagattttttgttaacgtgggaacagacgccagatgaactgaaacaagtactggacgttgccgcagcattaaaagcactgcgtgctgaaaacatcagtaccaaagtctttaatagtggattaggtatttccgtattccgcgacaactccacccgtacccgcttctcttatgcttccgcgcttaacctgctcggccttgcacaacaagatctcgacgaaggcaaaagtcaaatcgctcacggcgaaaccgtgcgtgaaaccgccaatatgatctccttctgcgccgacgctattggtattcgcgacgatatgtatctgggcgcaggcaacgcctatatgcgtgaagttggcgctgcacttgatgacggttacaagcagggtgtactgccacagcgtccggctttagtgaacctgcaatgcgatattgaccacccgactcagagtatggctgacctcgcgtggttacgtgaacactttggtagtctggaaaacctgaaaggtaaaaaaatcgccatgacctgggcctactctccaagctatggcaaaccgctctctgtaccacaaggcatcatcggtctgatgactcgcttcggtatggatgtcaccctggcccatccggaaggctacgacctgatcccggatgtggttgaagtggcgaaaaacaatgctaaagcctccggtggtagcttccgtcaggtcaccagcatggaagaagccttcaaagacgcagacatcgtttatccgaagagttgggcaccttacaaagtgatggaagagcgtactgaattgctgcgtgcgaacgatcacgaaggcttaaaagcactggaaaaacagtgtctggcacagaacgcgcaacacaaagactggcattgtactgaagagatgatggaactgacccgtgatggcgaagccctgtacatgcactgcctgccagctgatatcagcggcgtatcctgtaaagaaggtgaagtgactgaaggcgtattcgaaaaataccgtatcgctacctacaaagaagccagctggaagccttatatcatcgccgcgatgatcctgtcccgtaaatacgccaaaccaggtgcactgctcgagcaactgctgaaagaagcgcaagaacgcgtgaaataacccctcgggccgatcagctggtcggccctctatttccagaggccaaaaggataggatatgtccgttttcagtttgaagattgatatcgccgataacaaatttttcaacggcgaaacaagtccgctctttagccaaagccaggccaaactggcgcgccagttccaccagaaaatagctggttatcgcccaacaccgctttgtgcgctggacgatctcgcaaacctttttggtgtgaagaaaattctcgtcaaagacgaaagtaaacgattcggtctgaacgccttcaaaatgcttggcggtgcgtacgccatcgctcaattattgtgtgaaaaatatcatcttgatatcgaaacgctgagttttgagcacctgaaaaatgccatcggcgaaaaaatgactttcgcgaccaccaccgacggcaaccacgggcgcggtgtggcgtgggcagcacagcaactcggacagaatgcggtgatttacatgccgaaaggttctgctcaggaacgcgttgacgccattctgaacctcggtgccgagtgcatcgtcacggatatgaactatgacgataccgttcgcctgaccatgcaacacgcgcagcagcacggctgggaagtggtacaggacacggcatgggaaggttacaccaaaatcccaacctggatcatgcaaggctacgcaaccctggcagatgaagccgtcgagcaaatgcgtgaaatgggcgtaaccccgacgcacgttctgctgcaagccggtgtcggagcaatggccggtggtgtgctgggttatctggtcgacgtctatagcccgcaaaatctgcacagcattattgttgaacctgacaaagctgactgtatttatcgctccggcgtcaaaggcgacatcgtcaacgttggcggtgatatggccaccatcatggcaggcctggcctgtggcgaacctaacccgctgggctgggaaatcctacgtaactgcgccacccaattcatctcctgccaggacagcgttgccgcattaggtatgcgcgtgctgggtaatccgtacggcaacgacccgcgcatcatctccggtgaatccggcgctgtcggtttgggcgttctcgcagcggttcattatcacccgcaacgtcaaagcctgatggaaaaactggcgctgaacaaagatgccgtggtgctggttatcagcactgaaggcgacaccgacgtgaagcactaccgcgaagttgtctgggaaggcaaacacgctgtagcaccttaatcaccctattggaactgctccctgcaaaacggggagtaaaaaatctggagaaaaataatggctaagaatattccattcaaactgattcttgaaaaagcaaaagattaccaggcggatatgactcgcttcctgcgcgacatggttgctattcccagtgaaagctgcgacgagaaacgcgtagtacatcgtattaaagaagagatggaaaaagtcggcttcgataaagttgaaatcgacccgatgggcaacgttctcggttatatcggccacggcccgcgtctggtggcaatggacgctcatatcgataccgtcggcattggcaacatcaaaaactgggacttcgatccgtacgaaggcatggaaactgatgaactgattggtggtcgcggtacttccgaccaggaaggtggcatggcctctatggtttatgccggtaaaatcattaaagacctcggtctggaagatgaatataccctgctggttaccggtacggtgcaggaagaagactgcgacggtctgtgctggcagtacattattgaacaatccggcattcgcccggaatttgtggtcagtaccgaaccaaccgactgccaggtataccgtggtcagcgcggtcgtatggaaattcgtattgatgttcagggtgttagctgccacggttctgcaccagaacgcggtgataacgccattttcaaaatgggtccgattcttggcgaattacaagaactctcccaacgtctgggttatgacgaattcctcggcaaaggcaccctcaccgtttctgaaatcttcttcacatccccaagccgttgcgctgtagcagacagctgcgcagttagtatcgaccgtcgtctgacctggggcgaaacctgggaaggcgcgctggacgaaatccgcgccctgcctgcagtacagaaagctaacgcggttgtttctatgtacaactacgaccgtccgtcctggactggcctggtttacccaaccgaatgctacttcccgacctggaaagtggaagaagatcacttcaccgttaaagcactggtgaatgcctacgaagggctgtttggcaaagcgccggttgttgataagtggaccttcagtactaacggcgtatctatcatgggccgtcacggcattccggtgatcggctttggcccgggtaaagaacctgaagcgcatgcacctaacgaaaaaacctggaaatctcacctggtgacctgtgccgcgatgtacgctgcaatcccgttaagctggctggcaacagagtaattactcttcacttattcccctccggttcgccggagggtttttggagtttgctatgcgcgtattgatcaaaaacggcactgtcgttaacgcagatggacaagccaaacaggatttgctgattgaaagcgggattgttcgccagttgggcaacaatattagcccgcagctcccgtatgaagaaattgatgccactggctgttacgttttccctggcggcgtggatgtccatacgcatttcaatattgatgtcggcatcgcgcgcagttgtgatgatttttttaccggtacccgcgcagctgcgtgtggcggtacaacaaccattattgaccatatgggatttggcccaaacggctgtcggttacgccatcaactggaggtttatcgtggttatgccgcccataaagcggtcatcgattacagctttcacggtgtgatccagcacattaatcacgcaatcctcgacgaaatcccgatgatagtcgaggaaggactgagcagttttaaactctatttaacctatcaatacaaactcaacgatgacgaggttttgcaggcattacgccgcttgcatgaatccggcgcgctgaccaccgtgcacccggaaaatgatgcggctatcgccagcaagcgggcggaatttatcgccgcagggttaaccgcgccgcgctatcatgccttgagtcgccctctggaatgcgaagcggaagccatcgcccgcatgattaacctggcacaaattgccggtaacgccccgctctatatcgtgcacctgtctaacggcttaggtctggattatctgcgtcttgcccgtgcgaatcaccagccagtctgggttgaaacctgcccacaatatctcctgttggacgaacgcagttacgatacagaagatggcatgaagttcattcttagcccaccgctgcgtaacgtacgcgagcaggacaaactgtggtgtggcatcagcgatggtgcgattgacgtggtggcaaccgatcactgcaccttcagcatggctcaacgcctgcaaatttctaaaggcgatttcagtcgctgcccaaatggcttacccggtgtggaaaaccgcatgcagttactgttttccagtggcgtgatgacgggacgtataacaccggaacgctttgttgaattaaccagcgcaatgcccgccaggttgtttggcctgtggccgcaaaaaggattattagcgcccggttccgacggcgacgtggtgattatcgacccacgtcagagccaacaaattcagcatcgccatctccacgacaacgccgactacagcccatgggagggttttacctgtcagggcgcgattgtcagaaccttatcccgtggtgaaacgattttctgtgacggcacctttacaggcaaagccgggcgaggtcgtttcctgcgacgcaaaccgtttgtccctcccgtgctctaaccactgccagggatctatacacaatcaagaatgatgagtgaggaaaaatgagtaagaaaattgttctcgccctgggcgggaatgcgctgggcgatgacctggccgggcaaatgaaagcggtaaaaattacttctcaggcaattgttgatttaattgcccagggacatgaagttatcgtcactcatggtaacgggccgcaggtgggcatgattaaccaggcctttgaagctgccgcaaaaactgaagcgcacagcccaatgctgccgatgtctgtctgtgttgcattaagccagggttatattggttacgatctacaaaacgctttaagagaagaactgctttctcggggcattaataaacctgtagcaacgctggttactcaggtcgaagtcgacgctaacgatccggcattcctcaacccgaccaagccgatcggtagcttctttaccgagcaagaagcagagcaactgacaaaacagggttacactctgaaagaagatgctggtcgcggctatcgccgtgttgttgccagcccaaaaccggttgatatcattgaaaaagaaacggttaaagctctggtagatgcaggtcaggtggtgatcaccgttggcggtggtggtatccctgttattcgtgaaggtaaccatctgcgtggtgccagcgcggttatcgataaagactgggccagcgcccgtttagcagaaatgattgatgccgatatgctgatcattctgactgcggtagaaaaagtggccattaacttcggtaaagagaatgaacagtggctcgatcgcctgagtttaagtgatgctgaacgctttatcgaagaaggtcattttgcgaaaggttctatgctgcctaaagtggaagctgccgccagctttgctcgctctcgcgcaggtcgtgaagcactgattaccgtattgagcaaagcgaaagaagggattgaaggcaaaacaggaacggtgatttgtcagtaatttaaaggccgggtgggtaataccatccggccaaagattgtcaagtaagtgcgctttgttgatgccggatgcggcgcgagcgccttatccgtcctacaaaacatcgcaaattcaatagattgcaatgcacttgtaggcctgataagcgtagcgcatcaggcaatttggcgtttgtcatcagtctcaggccgggtgggtaataccatccggccattttcatttaagccacttccagcacttcttttgtcgctttcacgccctgatgcatcaacatcattaacgcctcaagtacgccgccgccaatcgcccgggctttatcagaaacgctggtgaaatcagcggtttcaccacgaggatcgatatcaccaattttaaaaccaccaaccactgccaggccgtcgttcaacaagccacgcaccatccccgtcaacggtgctttaatttcatgctcaccaatccaggcaatcacatcgccctctttcaccagatcgcctaatttcacgttggatcgcataatgcctgcagcaggagcacggatcacccgtcgggtggtatgccccataatattgccaggaacaccggtattctcctgcgcacaaccagagtaaatcacctgaccgagccagtgcccgcgatttgtttcaattaccgcatgacaatccttcccagcagtaaagcccggcccaagcgcgattgttactggtgccatatctgcccgcgttcccaaattctgtttcgccagaatagcgtccaccacgcaaagcggtttcagttcatcaagcaaactacaggcgggatctaccatcacaggaatgaatccgcgttcggtaagtttcatcgcttccgcagagctggttgccaggcgagcagtgacgccttcgaccgtcatttcgccatcgaacacggcctgggcaaacgccacggtacaacgaatcactgtcggtttttccacttccagcatgatcactttaaaacccgcatgatacagacgtagcgccacaccactggcgatatctcccgcaccgcgaatcaccaccagctggtgtccggaaggatgagaaggtttcatcatcagcccacccggcgcgttatttttcacctgtaatatttctgccagcacgctgatggcgatctcctgcggcgtttccgcacctatgttgtaaccaacgggcgcatgtaaacgggcaatatgttcttcagccacgcctttctcacgcaattgacgcaggaaaagctgaaccttgcgacgacttgccagcaaccccaaccatgcaatgggctgttcaatgagtttgtcgagggcttcacgatcctgattattcgtggcaatcaggacaaaattatcagggcgaatatccagtgcttccactgccgcaccaaagctctcagcatggagaagcgtggtacttggtgggaatagttcaggattgaggctttcgcgataaatatcagcaacggcaatatcaaatcctaatagcgccgcactctgggctatcgcccggttgacatgccccgcgccaatcaacaccagacgtggacgcataccatggacgctgataaatacactcattgcacctccacaatcactcccgacagcatccgcaccgttacgagccatacgtccatggaataatcgcggcttacgttcctgcaatgcctgaaggctctcttcaatcaccttccgctcaaccattccgccaccaattgtaccgacgatagaaccatcggcgcgcactaacatttgtgcagaatggcggggagtgctgcctcggctatcaacaatttgcgccatagcaaacggacaattttgctcttcgagttttgcagcctctgtgaaaatattcataccaacctcaatggatatcctttcagtaacccggaatacccgggccgttaattcacaaatctgcgcgcgattgcaggatgttcttgtatatcgcccagccagattgcctctacgtcgtgttgttgcagcggttgaaggagctcgctttgtgcaatcgcattctcacattgagaaaaacggttaatgaaccagactcgccgacaaccttgcggtacgtttttaaacgccccctgagggtggcgaaccagcgcaacgagatcgctcagttgcaaggttgcatcaggtgttaacccggtaatatcagcaaactggctccagcgatggacattttctgtgctcactttcgcgcccaaagtatgtcctcccatcacagcaatcacgcagcaactgcttttgggtatgcaaggttcgtgctcatcaggcgcttttaacggcattccacggctgccatctgcttcaatgagaattacgtcacactctggtcgttgcaccagtgcatcaatcgcttctggcgtaaatccctgcacttttccctggttcgctttccagctgtgaaaacaaaaactaatgggggatgtaagagacgcatgaggaagcatggcgggatcacgacagaaaaccacgggccagtgagacgttggcataaacatatgtgtcgtcgtcgtgattaacacacgcctgccgctagcctggagcagttctgccagccaaaaaagcaagctggttttccccccagcaccaacaacagaaatcacagtgggacgtttctgcgcacctaaatcaatgactaatgcgcttgggtcaactatacttttcacgagtctttatgacctctctgggataaattatccccaacttaatccatcaggaagtaacgcaattatcaggcgttattagcccctataaataatggaaccactatgagtgccatcgactgtataattaccgctgccggattaagtagtagaatggggcaatggaaaatgatgttaccctgggaacagggaacaattcttgatacaagtatcaaaaatgcgttgcagttttgtagccgaattattttagtcaccggctatcgtggtaatgaactgcacgaacgttatgcgaaccagagcaatatcactattattcacaacccagattatgcgcagggtttactaacatccgtcaaggccgcagtacccgcagtgcaaacagaacattgttttctcacccacggtgacatgccaaccctcaccatcgatatttttagaaaaatctggagcttacgaaatgatggcgcaatactgccactccataatggcatccccggccatccgattttagtgagtaaaccatgcctgatgcaggcaatccaacgacccaatgtcaccaatatgcgtcaggcactccttatgggagatcattattccgtcgaaatagaaaatgcagaaataattttagatattgatactccggacgactttattacagcgaaggaaaggtatactgaaatttaaaaaacgtagttaaacgattgcgttcaaatatttaatccttccggcactcattatcataatgataaggaatcactgattttgagaaaagagaaaaattgataaatgggctggcaataataattttcaggagtgattttaattctcatttagcacctgtgagttcattcacaaaaagcccttaagtttcgagccgcctcacatttttttatatttcccgccaaacctggcaagagtggtgcgattgttgctctatccccctaaaccaccggatttctcaacaccggtcactcaatgatatctgtataagctaaggagagggttatgggggatattatgcgtcccattccgtttgaggaacttttgacgcgcatatttgatgaataccaacaacaacgcagtatctttggtattcccgagcaacagttttacagtcctgtaaaaggtaaaactgttagcgtcttcggtgaaacctgtgccactcccgtcggccctgccgctggcccgcacacgcagctcgcgcaaaatattgtcacttcctggctgactggcggacgcttcatcgaactaaaaaccgtccaaattcttgaccgcctggagctggaaaagccctgtatcgatgccgaagacgagtgctttaacaccgaatggtctaccgagtttaccctgcttaaagcctgggatgaatacctcaaagcctggtttgccctgcaccttctcgaagcgatgttccagccttctgattccggtaaaagcttcatctttaatatgagcgtcggttacaacctcgaaggtattaagcaaccgccgatgcaacagttcatcgacaatatgatggacgcatctgaccatccgaaattcgctcaatatcgcgatacgctgaataaattactccaggatgacgcatttttagctcgccacggattgcaggaaaaacgcgaaagcttgcaagccttacccgctcgcatccccaccagtatggtgcatggcgtcaccctctccaccatgcacggctgtcctccgcatgaaatcgaagccatttgccgctacatgctggaagaaaaagggctcaacacctttgtgaaacttaacccgaccttactggggtacgcgcgtgttcgtgagatcctcgatgtctgcggtttcggttacataggcttaaaagaagagagttttgatcacgacctcaagctgacgcaagcactggaaatgctggaacgcctgatggcactggcaaaagaaaaaagtctcggctttggcgtaaaactgactaacactctcggcaccatcaacaataaaggcgcactgcctggtgaagagatgtatatgagtggccgtgcgctgttcccgctctccatcaatgttgcagcagttctctctcgcgcctttgacggcaaactgcccatttcttattccggtggtgccagtcagctgactatccgcgatatttttgatacaggtattcgccctattactatggcaaccgacctgctgaaacctggcggctatctgcgcttaagtgcctgcatgcgcgagctggaaggctccgacgcctggggacttgaccatgttgacgtcgaacgactgaacagactggcagcagatgcgttaaccatggaatacacccagaaacactggaagccagaagagcgtattgaagtggcagaagacctgccgctgaccgactgctacgttgccccctgtgttactgcctgcgctatcaagcaagatattccggaatacatccgtctgcttggcgaacaccgctatgccgacgcgctggaactcatctaccaacgcaacgctctgcccgccattaccggtcatatttgcgatcaccagtgccaatacaactgtacccgcctggattacgacagtgcgctgaatatccgcgaactgaaaaaagtcgcgctggaaaaaggttgggatgaatataagcaacgctggcacaaaccagccggttctggtagtcgccatccggttgccgtgattggtgcaggtccggcgggtctggcagcaggttacttccttgccagagcgggccatccggttacgctgtttgaacgcgaagccaatgcgggcggcgtggtgaaaaatatcattcctcagttccgtattcctgcagagttaattcagcacgatatcgattttgttgccgctcacggcgtgaaatttgagtatggctgcagtcccgatttaaccattgagcagttaaaaaatcagggcttccactatgttctgattgccaccggcactgataaaaatagcggtgtgaaactggcgggcgacaaccaaaatgtctggaaaagtctccccttcctgcgtgaatacaacaagggtacagcgctcaagctgggcaaacatgtggtcgttgtcggggcgggtaacaccgcaatggactgcgctcgtgcggcgttacgcgttccaggcgtagaaaaagcaacgatcgtttaccgtcgtagtctacaagagatgcccgcatggcgcgaagagtatgaagaagcgttgcacgacggcgtagagttccgtttcctgaataatccggaacgtttcgatgctgatggcaccttaaccttgcgcgttatgagccttggcgaaccggatgagaaaggtcgtcgtcgtccggttgaaaccaatgaaacagtaacactgcttgtagacagcctgatcaccgccattggtgaacagcaggatactgaagccctgaatgcgatgggcgtgccgctggacaaaaacggctggccagacgtcgaccataatggcgaaactcgtctgactgacgtctttatgatcggcgacgtacagcgcggaccatcctccattgtcgctgctgtcggaaccgcgcgtcgggcgaccgatgccatccttagtcgggaaaatatccgttcccaccagaacgataaatactggaacaacgtcaatccagcggaaatctatcaacgtaaaggcgatatctctatcacgctggtgaacagtgacgatcgtgacgcgtttgtcgcccaggaagccgctcgctgcctcgaatgtaactacgtttgcagcaagtgtgtggatgtctgcccgaaccgcgccaacgtctccattgcggtcccaggcttccagaaccgtttccagacgctgcacctcgacgcttactgtaacgaatgcggcaactgcgctcagttctgtccgtggaacggtaaaccgtacaaagacaaaatcaccgtcttcagcctggcgcaagactttgataacagcagcaacccaggcttccttgtggaagattgccgggtacgagtacgtctgaataaccaaagctgggtgttaaacatcgacagcaaaggtcagtttaacaacgtaccaccggagctgaacgatatgtgccgcatcatcagccatgtccaccagcatcatcattatctgctgggccgcgtggaggtgtaatcatgttgattctgaagaatgtcactgcggtacagctacacccggcaaaagtgcaggaaggcgttgatatcgccatcgaaaacgatgtgattgtcgctatcggcgatgccctgacgcaacgctaccccgacgccagcttcaaagagatgcatggccggattgtgatgccagggattgtctgcagccacaaccatttttacagcgggctttcccgcggaattatggcaaacatcgcccctttgcccggatttcatcagtacgctgaaaaatctctggtggcggctcgatcgcgcccttgatgaagagagcctctattacagcggactgatttgttccctggaagcgattaagagcggatgtacaagcgttatcgatcaccatgcctctccggcgtatatcggcgggagactctccacattgcgcgacgcatttttaaaagttggcctgcgcgcgatgacctgttttgaaactactgaccgtaacaacggcatcaaagagttgcaggaaggtgtagaagaaaacatccgtttcgcccgtttgattgatgaggcgaagaaagcgacaagcgagccgtatctggtggaagcacatatcggtgctcacgcgccgtttaccgtgccggatgccggtctggagatgctgcgtgaagccgtgaaagccacaggccgtggtttgcatattcacgctgcggaagacctttacgacgtttcctacagtcaccactggtacggcaaagacctgctggcacgactggcgcaattcgatctcatcgacagcaaaacgctggtcgctcatgggctgtacttgagcaaagatgacatcaccctactcaatcagcgcgatgcgttcctggtgcataacgcccgtagtaacatgaacaaccatgtcggctacaaccatcaccttagcgacatccgcaatctggcgttgggaacggacggcattggtagcgacatgtttgaagagatgaaatttgccttctttaaacatcgcgatgcgggtggtccgctgtggcctgacagttttgccaaagccctgactaacggtaacgaactgatgagccgcaactttggcgcgaaatttgggcttctggaagccggttacaaagctgatttaaccatttgcgattacaacagcccgacgccgctgctggcagacaatatcgccgggcatatcgctttcggtatgggcagtggcagcgttcacagcgtgatggtcaatggtgtgatggtctatgaagaccgtcagtttaacttcgattgcgattccatttatgcacaagccagaaaagccgctgccagtatgtggcgtcggatggatgcgctggcataaatgacagatgccctcttcccgcagggaagagggttaaataaggaaagaagatgattgaacaatttttcaggcccgactctgtcgaacaggcgctggaactgaagcgccgctaccaggatgaagccgtctggttcgccgggggcagcaaactcaatgctacaccaacccgtaccgataaaaagattgccatttccttacaggatctggaactggactgggttgactgggataacggtgcactgcggattggcgcaatgtctcgcttgcagccactgcgtgatgcgcgatttattcctgcagcgctgcgtgaagccctcggttttgtttacagtcgccatgttcgtaatcagagcaccattggtggtgaaatcgccgcccgccaggaagagagcgtgctgcttcccgtcctgttggcactggatgctgaactggtttttggcaacggcgaaacgctgagtatcgaggactacctggcctgcccatgcgatcgcctgctaaccgaaattatcattaaagatccgtatcgcacctgtgcgacccgcaaaattagccgttctcaggcaggtttaaccgtcgtgacggcagccgttgcaatgacagaccacgacggtatgcgaattgcgctggatggcgtcgccagtaaagcactgcgtctgcatgatgtcgaaaaacaaaatctggaaggcaatgcacttgaacaggctgtcgccaacgccattttcccgcaggaagatttgcggggcagcgtggcctataaacgctatatcacgggagttctggtagccgacctgtatgccgactgccaacaggctggggaggaagccgtatgatcatccactttactttaaatggcgcgcctcaggagctaaccgttaatccaggcgaaaacgtgcaaaagctgttgtttaacatgggaatgcactctgtacgcaacagtgatgatggtttcgggtttgccggttctgacgcaataatctttaacggtaatatcgttaacgcgtccttgcttattgccgcacagttagagaaggcagatattcgtaccgcagaatctctgggcaaatggaacgagttaagtctggttcaacaggcaatggttgatgttggcgtggtgcagtctggttataacgatccagctgcagctctgattatcaccgatcttctcgatcgcatcgccgcacctacccgcgaagagatcgacgacgcgctttctggtttgttcagccgcgatgctggctggcagcaatactatcaggtcattgaactggcggttgcacgtaaaaataatccgcaggccaccattgatatcgctccgactttccgtgacgacctagaagtcattggtaagcattatcctaaaactgatgccgcgaaaatggtgcaggcgaaaccctgctatgttgaagaccgcgtaacggctgacgcctgcgtcattaaaatgttacgtagcccacacgctcacgcactgattactcatctggatgtcagcaaagctgaagccttaccgggcgtcgttcacgttattactcacctgaattgcccggatatctactataccccgggtggtcagagcgcaccggaaccgagtccgcttgaccgccgtatgttcggcaagaaaatgcgtcacgtcggcgatcgtgttgctgcggtcgtcgcagaaagtgaagaaattgcgctcgaagcactgaagctcatcgacgttgaatatgaagtgcttaagccggtaatgagcatcgacgaagcaatggcggaagatgcgcctgtcgtgcacgatgaaccggtggtgtatgttgctggtgcgccagatactctggaagacgataacagccatgcagcccagcgcggcgagcatatgatcatcaacttcccgatcggttctcgccctcgcaaaaatatcgccgccagtattcatggtcatattggcgatatggacaaaggctttgccgatgccgatgtgatcattgagcgaacctataacagtacgcaagcgcagcagtgcccgactgaaacacatatctgctttactcgtatggacggcgatcgtctggttatccacgcctccacccaggtaccatggcacttacgccgccaggtcgcgcgcctcgtgggcatgaaacagcataaagttcatgtcattaaagagcgagttggcggcggttttggttccaaacaggacatcctgctggaagaagtgtgcgcctgggcaacctgcgtgaccgggcgtccggtactgttccgctacacccgtgaagaagagtttattgctaacacctctcgtcacgtcgcgaaagtcaccgtcaaactgggagcgaaaaaagatggtcgcctgacggcagtgaagatggatttccgcgccaacactggcccttacggcaaccacagtctcaccgtaccgtgtaacggaccggcgctgagcctgccgttatatccgtgcgataacgtcgatttccaggtcaccacctactacagcaacatttgcccaaatggtgcttatcagggttatggcgcaccgaaaggtaacttcgctatcaccatggcattagcggaactggctgaacagttacagatcgaccaactggaaattatcgaacgtaaccgggtacacgaagggcaagagctgaaaattctcggtgcaatcggtgaaggtaaagcgccgacctccgttccttccgccgccagctgtgcactggaagagatcctgcgtcagggtcgcgagatgatccaatggagcagtccgaaaccgcaaaatggtgactggcacatcggtcgcggcgtcgccattatcatgcagaaaagcggtatcccggatatcgatcaggctaactgcatgatcaaactggaaagcgacggcacctttatcgttcattctggcggtgcggatattggtactggtctggatactgtagtgacgaaactggcagcagaagtgctgcactgcccaccgcaggacgtgcatgttatctccggtgataccgatcatgcgttgtttgataaaggcgcatatgccagctccggtacttgcttcagcggtaacgcggcgcgtttggcagcggaaaatctacgggagaaaattctgttccacggcgcgcaaatgttgggtgagccagtggcagatgttcaactggcaacgccgggcgtcgtgcgcggcaagaaaggcgaagttagtttcggggatattgcccataaaggcgaaaccggcaccggctttggtagtctggtgggaactggcagttatatcacgcctgatttcgccttcccgtatggcgcaaacttcgctgaagttgccgtcaacacgcgtacgggtgaaatccgcctggataaattctacgccttgctggactgcggtacaccggtcaatccagagttagcgttgggacaaatctacggtgccaccctgcgtgctatcggccacagtatgagcgaagagatcatttatgacgccgaaggtcacccgttaacgcgtgatttacgcagttacggcgcaccgaaaattggtgacattccgcgtgatttccgcgctgtgctggtgccgagcgacgataaagtcggcccgttcggggcgaaaagcatcagcgaaatcggtgtaaatggcgcagctccggcgattgctaccgcaattcacgatgcatgcggcatctggttacgcgaatggcatttcacaccggagaaaatactcactgcgctggaaaaaatataaataataaatggccgcttcggcggcctgtttctctgtttgaacgatgactaaatagtgactgcgaaaatgagataagccgttctcaaggcgtcctgcgccccaaattcgtgggaatttattttactaattcagatgatcaaatttactttaaaaggagtgaagggatgtctgatataaaccatgcaggttctgaccttatatttgaactggaggatcgccctccctttcatcaggctctcgttggtgccattacccatctgttggcaattttcgttccgatggtaacccccgcgttaatcgtgggtgcggccttacagctttccgctgaaacaactgcctatcttgtttctatggcgatgatcgcctctggtattggtacctggttacaagtaaaccgctacggcatcgtcggttctggcctactcagtattcagagtgtcaattttagttttgttacggtcatgattgcgctgggcagcagcatgaaaagcgacggttttcacgaagagttaatcatgagcagccttctcggcgtctccttcgttggcgcatttctggttgtcggatctagttttatcttgccctatttacgtcgggttattacgcctaccgtcagcggtattgtggtactgatgatcggcttaagcctgattaaagtcggcattatcgattttggtggaggatttgcagccaaaagcagcggtacgttcggcaattacgaacatctcggcgttggtttattggttttaattgtggtgatcggctttaactgctgtcgcagtccgttgctacgcatgggagggatcgccattgggctatgtgtcggctatatcgcaagcttatgcctgggcatggtggatttcagcagtatgcgcaatttgccgttaatcaccatcccgcatccgttcaaatacggctttagttttagcttccatcagttcctggtggttggcacgatttatctgcttagcgtgctggaagcagtcggcgatatcaccgccacggcaatggtttcccgccgccccattcagggggaagagtatcagtcccggctgaaaggcggcgtgctggcagatggtctggtttctgttatcgcctccgctgtcggtagtttaccattaaccacgtttgcgcaaaataatggggttattcagatgactggcgtcgctagtcgttatgtcgggcgaaccatcgcggtaatgctggttatcctcggcttatttccgatgattggcggcttcttcacgaccattcccagcgcagttctgggaggcgcaatgacgttgatgttttccatgattgccatcgcagggattcgcatcatcatcaccaacggtttaaagcgccgtgaaacacttattgtcgccacttctttaggtttagggcttggcgtctcctacgatcccgaaatttttaaaatattgccagcctctatttatgtattagttgaaaaccctatttgtgctggcgggttaactgcgattttattaaatattatcctccctggtggctaccgacaggaaaacgttctgcctggtattaccagtgcggaagagatggattaacagtaaaggagtcaatgatgagtggagaacacacgttaaaagcggtacgaggcagttttattgatgtcacccgtacgatcgataacccggaagagattgcctctgcgctgcggtttattgaggatggtttattactcattaaacagggaaaagtggaatggtttggcgaatgggaaaacggaaagcatcaaattcctgacaccattcgcgtgcgcgactatcgcggcaaactgatagtaccgggctttgtcgatacacatatccattatccgcaaagtgaaatggtgggggcctatggtgagcaattgctggagtggttgaataaacacaccttccctactgaacgtcgttatgaggatttagagtacgcccgcgaaatgagcgcgttcttcatcaagcagcttttacgtaacggaaccaccacggcgctggtgtttggcactgttcatccgcaatctgttgatgcgctgtttgaagccgccagtcatatcaatatgcgtatgattgccggtaaggtgatgatggaccgcaacgcaccggattatctgctcgacactgccgaaagcagctatcaccaaagcaaagaactgatcgaacgctggcacaaaaatggtcgtctgctatatgcgattacgccacgcttcgccccgaccagttctcctgaacagatggcgatggcgcaacgcctgaaagaagaatatccggatacgtgggtacatacccatctctgtgaaaacaaagatgaaattgcctgggtgaaaagcctttatcctgaccatgatggttatctggatgtttaccatcagtacggcctgaccggtaaaaactgtgtctttgctcactgcgtccatctcgaagaaaaagagtgggatcgtctcagcgaaaccaaatccagcattgctttctgtccgacctccaacctttacctcggcagcggcttattcaacttgaaaaaagcatggcagaagaaagttaaagtgggcatgggaacggatatcggtgccggaaccactttcaacatgctgcaaacgctgaacgaagcctacaaagtattgcaattacaaggctatcgcctcagcgcatatgaagcgttttacctggccacgctcggcggagcgaaatctctgggccttgacgatttgattggcaactttttacctggcaaagaggctgatttcgtggtgatggaacccaccgccactccgctacagcagctgcgctatgacaactctgtttctttagtcgacaaattgttcgtgatgatgacgttgggcgatgaccgtagcatctaccgcacctacgttgatggtcgtctggtgtacgaacgcaactaataataaaactttaacatcctcgtgaggacatcattatgtctggagacatcctacaaacaccggacgcaccaaagccacagggcgcgctggataattattttaaaattaccgctcgtggcagtaccgttcgtcaggaagtactggctggcttaacgacctttctggccatggtttattccgttatcgtcgttccgggaatgctgggcaaagcaggttttcctcccgcagctgtgtttgttgccacctgtctggtcgcgggcttcggcagcttgctgatgggattatgggctaatttgccaatggcgattggttgcgcgatttccttgacggcgtttaccgcattcagtctggtactcgggcaacaaattagcgttcctgtcgcactgggcgcggtatttctgatgggcgtcatcttcaccgccatttccgtaaccggtgtgcgtacctggatcttacgtaatttgccgatgggtatcgctcacggtacaggtatcggtatcgggctgtttctgctgctgattgctgctaacggtgtgggtatggttatcaaaaacccgattgaaggcttgccagtggcgctcggtgcgtttacctccttcccggtgatgatgagcttgctggggctggcggtcatcttcggcctggagaagtgtcgcgtacccggcgggatcttgttggtgattattgcaattagcatcatcggcttaatctttgacccagcggtgaaataccacggtctggtggcgatgccaagcctgactggcgaagatggtaagtctctgattttcagcctcgatattatgggtgcactccagccaactgtacttccgagtgtactggcattggtgatgaccgcagtgttcgacgctactggcaccatccgtgccgtcgccggtcaggcgaatttgttggataaagacaaccagatcatcaacggcggcaaagccctgaccagtgacagtgtaagtagtatattctccggcctggtgggcgcagcgcccgcagcggtttatatcgaaagtgcggcaggaaccgccgccgggggtaaaacaggtttaaccgcaaccgtagtgggggcgttattcctgttaattctgtttttaagtccgctgagttttttgatccctggttacgccactgcacccgctctgatgtacgtaggtttgctgatgttaagtaacgtcagcaagctggatttcaatgattttattgacgctatggctggcctggtgtgtgccgtgttcatcgttctgacttgtaatatcgttaccggtattatgctgggctttgtgacactggtcgtaggccgcgtctttgcacgcgaatggcaaaagctgaatattggtacggtgatcattactgccgcactggtcgcattttacgcgggtggttgggcaatctaatagattctccgcgcctttcagcgcggagatttctttcagagaggattctcaccgctggcaacaatacgctgctggcggactcgcctgagttctctttcagtaagcaactgcagcgcctgtgttgggcaagattcaacgcaggctggcccctcttcccgctgttcacagagatcgcatttcacaatttgttgtcgggtatcccccggcaagctctgaatggtgatcattccaaacgggcacgcactgacgcaactctgacagccaatacaacgggcagaattggtctgcaccacctgctcgcccatcgtcagcgcccccacggggcaagcgccaacacaaggggcgttttcacactgatggcacatcaccggcgcactgatgctgtccagtcgctgtaccttcagccggggtaaaaagacatcggcattcaactcctgttcactagggtgagcgaccacacaggctacttcacaagtacggcagccaatacagtcagccggattaacgataattaagcttttcatcagcttgccttcgtatcaaacagagttaacatatcgcgcgccgcctgccttcctgcggccattgcagtgacaaccagatccgcgccatgaactgcatcaccaccagcaaagacttttttcagatgcgtctgggtaggtaaatacccgacgtcaccggtttgaatcaggccccatttatcgagtttaattccgctgccctgcaaccacggcatggcatgcgcctggaaaccaaaggccataatcagaacatcggcgggcaattcaaactcactacccgctaccggacgaggacgacggcgaccatccggccccggctcacccatggcggtacgaatcaggcccaccgcagttaaacgcccatcttcgtcacaagcgatatattgcggttgaacattgaactgaaactcgacaccttcctcgcgcgcattaaccacctctttgcggctgcccggcatactgacttcatcacgacgatacgcgcaggtcacgctggcggcattgaggcggatggaagtccgcaaacaatccattgtcgtatcgccaccgcccaataccacgactcgcttaccttccacgtccgtcagcggatactcttcagactccggcaatcccatgagctggcgggtatgggcagtcaggaacggtagagcctgaatgacaccgggcgcatcttcatgcggcagatctgctcgcatcatcccgtaagtccccacgccgatgaaaactgcatcatattcagaagttaaatcgctaaaggtaatatcgcggccaatttcacagttaagatgaaagtcgattcccattgcggtgaatatctctcgccgctggcttaataccgttttatcgagtttgaaaggaggaatgccaaaagtcagcataccgccaatttctggatggcgatcaaagacatcgacctgaactcctgcgcgcgccagaatatcagcacaccctaaccctgcaggcccagcgccaatcaccgccactttttcgctacggggaacaactttgctgacatcgggacgccaacccatcgccagcgcggtatcggtgatgtagcgttccagattaccgatagagactgcgccgctgtgatctttcaaagtacatgcgccttcacaaagacggtcctgtggacataccctgccgcaaatttctggtaaggaactggtctggtggcaaagttctgccgcttcaataatctttccttcctgtaccagacggatgtaatccggaatagcgttatgcagcgggcaatgccagttgcagttagctttttcggcacaataaacacagcggtcactctcataagtcgcttgttgtggatccagcccgcaatatatttcgccaaagtgggttttccgttcactcgcactaattttatctgcgcctttacggctgttaacggggagcaacgctgcactgcgagatggctgagcgtcactactcgcttttcctgctgccgttttgcgctggcgggccacctttatctgctgcaaccctttatcgtccatcagtcgtaacgcctgtgttgggcaaacttcaatacaggcttgcgtgccggaactgcgctggttacaaaggtcgcatttctgcgcaatcgtatcgaccatctcaacgacgccaaaggggcaagcgattgcgcatcttttacaaccaatacatttttgctcgtccagttgtacgctatcggactggaaagtcagagcattaaccggacaagccgtaacgcaaggggcattgttgcagtgatggcaggccaccggattcgcagcctggcctttccctacaacgtggatacgcggtcgaaagtcactgtgactcagcggccagttttcttgattgtgtgccaccgcacaggcaatttcacaagcatgacagcctatacattccgcagcttcagcagcaataaacttattcatttgcatccctttcatttaatgagttatgtcttctcaaatttcgcgatgcaataaacgggcatatattaggtagcatgaccgttttaattataattttgcgactgagttcaaattattgcccctcaatctatgccgctttcattatttcaacattgccgatcaaaagagcgctatccagataaaaacgattaaatgcgagagtgcgacatgccagaatgattaatgaaatatcaatatgagaaaattacagataattccattgtcaggttctcttctcattttcgtggtttaaccacgattatgtgattgcctccgcaattcctgtctctaactccccttcctcgcaaaaactggcactccacgagcatgtgtttagacagtttcattaacgtaaacggttgctttttactctggcgggcgaaaggagaaacactgatgagcgccatagattcccaacttcccagttcttctgggcaagaccgcccaactgatgaggttgaccgcatattaagtccaggaaagctgatcatactcggtctgcaacacgtccttgtcatgtacgcaggtgcagtcgctgttcctcttatgattggtgaccgactgggcctcagtaaagaagctattgcgatgctcattagcagcgatctcttttgctgcgggatcgtcacattattgcaatgtatcggtatcggccgctttatggggatccgcctgccggtgattatgagcgtgacctttgctgctgtaacaccaatgatagccattgggatgaacccggatatcggcctgctggggatatttggtgccactatcgccgcgggttttatcaccacattattagcgccacttatcggtcgcttgatgcctttattcccgccactggttaccggtgtggttattacttctatcgggcttagcatcattcaggtgggtattgactgggccgccggaggtaaagggaatccgcaatatggtaatcccgtttatttaggtatctcctttgccgtcttaatttttatcttgctcattactcgctatgcgaaaggatttatgtccaacgtcgccgtattactggggattgtatttggctttttacttagctggatgatgaatgaagtcaatttatccgggctacatgatgctagttggtttgcgattgttacgccgatgagctttggtatgccgattttcgatcccgtttccattctgaccatgactgccgtgttaatcatcgtgtttatcgagagtatggggatgttcctggcactgggtgaaatagtcggtcgtaaactctctagccacgatattattcgcgggctgcgtgtcgatggcgtagggacaatgataggcggcacgtttaacagcttcccccacacgagtttttctcaaaacgttggcctggttagcgtgacgcgcgttcatagccgctgggtgtgtatttctagcggaattatattaatcctgtttggcatggtgccaaaaatggcggtgctggtagcctccattccgcaatttgtgctgggcggcgctggtctagtgatgttcggcatggtactggcgacagggattcgaattctgagccgctgtaactacaccaccaaccgttacaacctctatattgtggcgatcagtctcggcgttggcatgactccgacgctctctcacgatttcttttctaagttaccggccgtactgcaaccgctgctacatagcggcattatgctcgcaacccttagcgccgttgtgctgaacgtcttctttaatggctatcagcatcatgctgacctggtgaaggaatccgtctctgataaagatttaaaagtcaggacagtacgtatgtggcttctgatgcgcaagctgaagaaaaatgagcatggagaataatatgaattttttaatgcgcgctatattcagtctgttgttgctttttactctctctattcctgtcatttctgactgtgttgcaatggccattgaaagtcgcttcaaatatatgatgctacttttttaaatggtttttacctgtcggcatccgctcaaaacgggcggttgtcgataaacgctcacttggttaatcatttcactcttcaattatctataatgatgagtgatcagaattacatgtgagaaattatgcaaacggaacacgtcattttattgaatgcacagggagttcccacgggtacgctggaaaagtatgccgcacacacggcagacacccgcttacatctcgcgttctccagttggctgtttaatgccaaaggacaattattagttacccgccgcgcactgagcaaaaaagcatggcctggcgtgtggactaacagcgtttgtgggcacccacaactgggagaaagcaacgaagacgcagtgatccgccgttgccgttatgagcttggcgtggaaattacgcctcctgaatctatctatcctgactttcgctaccgcgccaccgatccgagtggcattgtggaaaatgaagtgtgtccggtatttgccgcacgcaccactagtgcgttacagatcaatgatgatgaagtgatggattatcaatggtgtgatttagcagatgtattacacggtattgatgccacgccgtgggcgttcagtccgtggatggtgatgcaggcgacaaatcgcgaagccagaaaacgattatctgcatttacccagcttaaataaaaaaaccccgacatttgccggggttgtgagcataacgtaatgcttattttaccggacgcatcgccgggaacagaataacgtcgcggatggtatggctgttggtgaacagcattaccatacggtcgataccaattcccagacctgctgtcggcggtaagccatgttccagtgcggtgacgtaatcttcatcgtagaacatcgcttcgtcgtcacctgcgtctttcgcggcaacctgatccaggaagcgttgcgcctgatcttccgcgtcattcagctcgctaaagccgttaccgatttcacgaccaccaatgaagaactcaaagcggtctgtgatttccgggttaacgtcgttacgacgcgccagcggagaaacttctgccggatattcagtaatgaaggtcggctgaatcagatgtgcttctgccacttcttcgaagatctcggtaacgatacggcccagaccccagctcttctcaacgtggatgccgatagattcagcaattgctttcgcagagtcgaagttgtccagatccgccatgtcggtttccgggcgatatttcttgatcgcttcacgcatggtcagtttttcgaacggtttaccgaagtccagcgtcacgtcgccgtaggtcacttccgtcttaccgagaatatcctgtgccagagtacggaacaggctttcggtcagctcgatcagatctttgtaatctgcgtaagccatgtagagttccatcatggtgaactctgggttatgacgtacggaaataccttcgttacggaagttacggttgatttcgaatacacgctcgaagccaccaaccaccagacgcttgaggtacagttccggcgcgatacgcaggtacatgtcgagatccagcgcgttatggtgggtgataaacggacgcgcagcggcaccgccagggatcacctgcatcatcggcgtttcaacttccataaagccgcggttcaccatgaactggcgaataccagagaggatctggctgcgcactttaaaggtgttgcgggattcatcgttggagatgagatcgagataacgctgacgatagcgcgcttcctgatcctgcaagccgtggaatttatccggcagcggacgcagtgctttggtcagcagacgcaactcggtgcagtggatagacagttcgccggttttggttttgaacagcttacctttcgcgccgaggatgtcgccgaggtcccattttttgaactgctcgttataaacgccttccgggagatcgtcacgggcaacgtacagctgaatgcgaccgccaacgtcctgcagggtaacgaaagacgctttacccataatacgacgggtcatcatgcggccagcaacggcgacttcgatgttcagcgcttccagttcttcgttctctttgccgtcgaattctgcgtgcaattggtcagaggtatgatcgcgacggaaatcgttcgggaaggcaatcccctgctcgcgcaggttcgccagcttctcacgacgcgttttcagttcattgttaagatcgactaccgcgtcagcgccctgtgcgtgttgttcagacatgttggttcctcataaccctgctttcaaacttgcttcgataaattgatccaggctgccgtccagcacggcctgcgtgttgcgggtttctaccccggtgcgcagatctttaatgcgggagtcatcaaggacataagaacgaatctggctgccccagccgatgtcggatttgttatcttccatcgcctgtttctcggcatttttcttctgcatctccagttcataaagcttcgctttcatctgcttcatggcctgatctttgttcttgtgctgggaacggtcgttctggcactgggtcacgatcccggtcgggatgtgggtaatacgcaccgcagattcggtacggttaacgtgctgaccgcccgcgccggacgtgcgataaacgtcaatgcgcagatccgccgggttgatttcgatatcaatatcatcatcaacttccggataaacaaacgcggagctgaagctcgtgtggcgacgaccgccggagtcaaacgggcttttacgcaccaggcggtgaacgccggtttctgtacgcagccagccgtaagcgtaatcgccggagattttgatcgtcacggatttaatacccgccacttcaccttcgctctcttcgatgatttcagttttgaaaccacggctttctgcccagcgcagatacatacgctcaagcatgctcgcccagtcctgtgcttccgtaccgccagaccccgcctgaatatcgaggtagcagtcggcgctgtcatattcgccagagaacatacggcggaactcaagctgcgccagtttttcttccagggcgtcgagttcagcaacggcttcgttaaaggtttcttcgtcgtcagcttctacagccagttccagcagaccagaaacatcttccagcccctgtttcatttggtcgagggtgtcgacaacggcttcgagggaggaacgctctttacccagcgcctgtgcgcgttcgggttcgttccagacatccggctgttccagctcggcgtttacttcttccagacgctctttcttggcgtcgtagtcaaagataccccctaagaacgtcggagcgttccgtgaggtcctgaatgcgattatttaccggattaatttcaaacatggtctgatttcttttattgagctagtcaaaatgcggtgataagagcgggattgtacccaatccacgctcttttttatagagaagatgacgttaaattggccagatattgtcgatgataatttgcaggctgcggttgccgcgaaactcgttgatatcgagcttataagccagttgcacttcgcgcacgccgttatccggccagagggcggtatcgacattaaaagcaataccatccagcagtggaccgccgccgaccggttcgaccatcaccttcaaatgacgttcgcccaccagccgctgttgcagcagacggaaatgaccgtcaaacagcggctccgggaacatctgcccccacgggccagcatcgcgcagcagctgcgccacttccatggtcatttcggccgggcttaacggaccgtcacttaccacttcgccttgcaataggctagggtccagccactcagtaaccagttcgccaaaccgttgttgaaagagtttgaatttatcctcttccaggctcaaacccgccgccatcgcatgaccgccaaacttcagcatcatgccagggtagagtgtgtctaatcgctccagcgcatcacgcatatgcagcccctgaatggagcgaccggaacctttcagcgtaccgtcacctgctggcgcaaacgcgataaccggacggtgaaaacgctctttgatgcggctagccagaataccgacaacgccctgatgccattcggggtgatacattgccagcccgccgggtagcgtgtcacggctgcgctccagtttctcgcacagggtcagggcttcaatttgcattccttgttcgatctcttttcgcgtctggtttagcgcatcgagttcatttgccagcacgcgcgcttcgccgatgttgtcgcacaacaacagcgccacaccgacggacatatcgtccagtcgtccggcagcattgagacgtggccccagcgcaaaacctaaatcgctggcggcgagtttttgtgcatcacggtttgccacttcaagcagcgctttaatccccggacggcactttccggctcggatgcgactcatcccctgccaggtcagaatgcgattattagcgtccagcggcacgacgtccgccactgtccccagcgcgaccagatccagcagttctgccaggttaggaattgcgatgttacgctcatcaaaccagccctgatcgcgcaaaaaggtgcgcagcgccagcatcagataaaacgccacacccacgcctgccagacttttgctcgggaaattacagtcgcgcaagttagggttaatgatcgcttccgctgcgggtaatgtgtcgcctggcaaatggtgatcggtaacaataaccgggatgcccaagctgcgagcgtgctcaacccccgcatgggaggaaataccgttatccaccgtgacaattaactgcgcgccacgggcatgggcctgatcgaccacttccgggcttaagccgtaaccgtcttcgaaacggtttggtaccaggtagtcgatattgctgcaaccaaggctgcgcatcgccagcacgcttagagccgtgctggtcgcgccgtcggcgtcgaaatcaccgaccacaataatccgcgttccttcgcgaaaagcgttgtaaaggatctcaacggccttttcgacgccgctcagttgctgccagggcagcatacctttaacactgcgttccagttcttgcgcactgcgtactccccggctggcgtataaacggcgcagcaagggaggcaattcagcgggcaagtctgccgtttcatcgacttcacggcgacgaagttgtatctgttgtttcacgcgaattatttaccgctggtcattttttggtgttcgtcgaggaattctttcatctctttcggcggctggtaacccggaacaagtgtgccattgctcagcacaactgccggagtaccgctaacgccaagctggacgccaagtgcgtaatggtcggcaatatccacgtcgcaactggctggtgcgacgcttttacctgccatcacatcatcaaacgctttgtttttatctttcgcacaccagatagctttcatttctttctctgcatcgctgtccagcccctggcgcgggaaagcaagataacgcacggtgatccccagcgcgttgtagtctgccatttgctcatgcagtttgtggcagtaaccacaggtaatatcagtaaacacggtgatgacgtgtttttcctgcggcgctttataaacgatcatctctttttcaagcgcattcaactgctttaacagcatcttattggtgacattgaccggagccgtgccactaacgtcatacattggcccctgaatgatatgtttaccatcatcggtgatgtacaacacgccgctgttagtcagaactgtcttcatgccagctacaggcgcgggctgaatatcgctgcttttgatgcccattttggctaacgtttgttgaattgccgcgtcatcagcctgagcaaagccactaaacgccgctaacaaagtaaacaacataaaacctttcttcataaatcttcccgttcttttcagacatcacgcccgcgggtgatgctgttgatgaagttgccgcagacgctcggtagcgacatgcgtataaatttgcgtggtggagagatcgctgtggcccagtagcatctgcaccacgcgtaaatccgcaccatgatttaataaatgagtggcaaaagcgtgacgcaacacatgcggactcagcttttcgctgtcgatacccgccagcacagcataatgtttaatacggtgccagaaggtctgtcgcgtcatctgctgcgcacgctggctgggaaacaacacgtcaatactcacaccattcagcagccacggacgcccatgttccagataggtttccagccagtaaaccgcctcttcacctaacggcaccagacgctctttgttgcctttaccaatgacccgtaccacgccctgacgcaggctgatatcactcattgtcagtccgaccagttcagagacacgcagcccggtagcatacaacacttcaagcatggctttatcgcgtagctccagtggctgatcgattaatggtgcctgtaataaacgttcgacctgcgcttcgcttaaatcttttggcaaacgctggggcaatttcggactagcgagatgcgcactgggatcgtcttcacgaaacttttcgcgataaagatactggaacaatcggcgcactgcactcagcaaacgcgcactgctggtggctttatacccgccctccagccgttctgccagtaatgcctgcaaatcgtcactttgcgccgtcgccagcgtcaacccgcggtgatgcaaccactccaccatcatactcagatcgcgacggtaagcgttcaacgtattttcagccagatttttttccagccacagagcatcaagaaactgctcgatgcgtgccagatcctgtttcacttgcgccccttatggtcactcatttgatccattatgccttattgtgccgtgactaaagcgattctgatacactagccgcaaaagccacagcagaatcgagaagcttacgttatgaatatgggtcttttttacggttccagcacctgttacaccgaaatggcggcagaaaaaatccgcgatattatcggcccagaactggtgaccttacataacctcaaggacgactccccgaaattaatggagcagtacgatgtgctcattctgggtatcccgacctgggattttggtgaaatccaggaagactgggaagccgtctgggatcagctcgacgacctgaaccttgaaggtaaaattgttgcgctgtatgggcttggcgatcaactgggatacggcgagtggttcctcgatgcgctcggtatgctgcatgacaaactcagcaccaaaggcgtgaagttcgtcggctactggccaacggaaggatatgaatttaccagcccgaaaccggtgattgctgacgggcaactgttcgtgggtctggcgctggatgaaactaaccagtatgaccttagcgacgagcgtattcagagctggtgcgagcaaatcctcaacgaaatggcagagcattacgcctgatctcactgacggcttagcgcatatgctttgccgtcatctttatctttgcgtctcttgttgcaacaaaatccgccgtaaatcccgccattcagcttcgtccatgctgtcggctgccagccataaatgttgccgtttaccgccatcagaacgtaaacgcagcatcatgccgctcttaatcatccacggtgctttgacgatgctccactcctgcccttgccaacgcaaacgcccgtccatcaacaagcgaatttccccctggcgagcattaatacgccgctggctgcgaacgcaatcaaacaccaccaggctaagtaacaccatccataacggggtgtaactgagtggccagggcatgagtaaaataacagcggcaaccagcccatgaatcagcaaggaaagccactgtgcgcgccaggagacgcgcaaatcagattgccacaggaccacgttcccggttccgtgtctggatgagtcggaccatcatttccagttctgcatcggccggtttaccgtgattcatcagccagttaaacaggtccggatcgtcacattccagcagacgaataaagatgcgtttttcgtcatcgcttaagctgtcgtactcatgttcgaaaaacggcatgatactaatatcgagttcgcgcataccacggcggcatgcccaatgaatgcgggctttgttgttaatgtccatcttcttcctgtctcacgaaaatccagtacccggctattgtaacgtgtttttcgccttcttttacgggaatatcagtaaacaccatcgcgatcgcgaaattaattcacaacaattcaatggcttcatttttttggaagtcgcctcgcagaaggcacagatcgcgtagtgaaagcacttgcattgcctcatagctcttttaccattagtcattaatacgccgttaagcaactcaggactctattatggcttttacaccttttcctccccgtcagcctacggcttctgcccgtttaccgctgacgctgatgacgcttgatgactgggcgcttgccaccattactggcgcggacagcgaaaaatatatgcagggtcaggtgacagcagatgtcagccagatggcagaagatcagcacctgctcgccgcccattgcgacgccaaaggtaaaatgtggagcaatttacgtctgttccgcgacggcgatggctttgcatggattgaacggcgcagcgtgcgtgaaccgcagctgactgaactgaaaaaatatgcggtattctctaaagtgaccatcgcgccagacgacgagcgtgtgctgcttggtgttgccggttttcaggcgcgcgccgcgctggcaaatctctttagcgaactgcctagcaaagaaaaacaggtagtcaaagaaggcgcgaccactttgctatggtttgaacacccggcagaacgtttcctgatcgtaaccgatgaagctactgctaatatgctgaccgataaactgcgcggtgaagcggaactgaacaatagccaacagtggctggcattaaacattgaagcgggtttcccggtgattgatgccgccaacagcgggcagtttatcccacaggcgaccaatctccaggcgctgggcggtatcagctttaagaaaggctgttataccggacaagagatggtggcgcgagcaaaattccgtggtgccaataaacgtgcgctctggttgctggcaggtagcgccagccgactgccggaagctggtgaagacttagagctgaaaatgggcgagaactggcgtcgtaccggtacggtactggctgcggtaaaactggaagatggtcaggtcgtggtacaggtcgtcatgaataacgatatggaaccggatagcatcttccgcgtacgcgacgatgcgaatacattgcatatcgagccgctgccgtatagcctcgaagagtaaatctctttatcgcatcaggcatttatcgcctgatgcgacgctggcgcgtcttatcatgtctgggatttgatgcctttatcacaacagggacgaggcccgtagatcggataaggcgttcacgccgaatccggcagttgtgctccgatgcctgatgcgacgctggcgcgtcttatcaggcctacaaaggcatacccattacgcctgcccaatatacaaatagatcgccagaaagtggcacacactaccgccgagcacgaagccgtgccagatggcatggttgtatggaatgcgtttgcagacgtagaaaatcaccccgaggctataaaccacgccgcctaccgccagtaaggtaacgctgcccgccgcgagcttaactgccatttcataaattaccaccaggctcagccagcccatcgccagataggtcaccagagataaaattttgaatcggtgcgcgatggtcagtttaaacagaatacccagcaatgccaggctccagataacaatcatcaacccgcgcgctaacggagaatccagccccaccagcaaaaacggcgtgtaggttccggcaatcaacaggtaaatagcgcaatggtcaaatttcttcagccacatttttgcccgttgatgaggaatggcgtgatagagcgtgctagcgaggaacagcaggatcatactgccgccatagaggctgtagctggttatcgctgtggcgctggcattaagatccaccgcctgaaccagtagcaacaccagcccaacgataccaaacaccaacccaatgccgtgactgacgctgttggctatttcctctgccagactatatccctgcttaatgaggggcttctgaaccataacttactccggagaaacgtacacgcacatgtatacctctccagcgtaactgagaatagttccagtgaacacctgttagctaaaataaattctgatttgagactaatctcctaaaaatcatgaaattaaatgcgaaatttcaactaacaggcgtgagttcaatttaaagacatttaaattcaatcacataaaattgtgtctgaccgggatagatgtcagcaatgacttttttcagttcagtcagggtcatattttcctgctctgcatgtttttcagtcagcgtatccagcgttacggtactggttgcggtgacttcaatcgtgcaaaaataaccgtcatcttcaaaacgtccgacacgaagcacatcacccgttttgaagtggctttcagactcgtcgcggatggtgatggttttacgcccagccagaatgtcatcctggaaacgttgaaaaaaagtgatgtcgtttggctgcatggtactatttcctgtaagaattgactcatctggagcctatgatagtgaaaaaactcaccttaccgaaagatttcttatggggcggcgcagttgccgctcatcaggtcgaaggcggctggaacaaaggcggaaaagggccgagcatttgtgacgttctgaccggtggcgcacacggcgtgccgcgcgaaatcaccaaagaagtcttgccaggaaaatactatccaaaccatgaagccgttgatttttatggtcactataaggaagacatcaagctatttgccgaaatgggcttcaaatgttttcgtacatccattgcctggacgcgcatttttccaaaaggcgatgaagctcagccaaacgaagaagggctgaagttctacgatgatatgttcgatgaactgctgaaatacaacatcgaaccggtgatcaccctctcccactttgaaatgccgctgcatctggtgcagcaatacggtagctggaccaaccgtaaagtggttgatttctttgtacgtttcgcggaagtggtatttgaacgctataagcacaaagtcaaatactggatgaccttcaacgaaattaacaaccagcgtaactggcgtgcaccgctgttcggttactgctgctccggcgtggtgtataccgagcatgaaaacccggaagagacgatgtatcaggtgctgcatcaccagtttgtcgccagcgccctggcggtgaaagctgcgcgtcgcattaacccggagatgaaagtcggctgtatgctggcgatggtgccgctctatccttactcctgtaacccggacgatgtgatgttcgctcaggagagcatgcgcgaacgctacgtctttaccgatgtgcagctacgcggctattacccgtcctatgtgttgaacgagtgggagcgtcgcggatttaacatcaaaatggaagacggcgatctggatgtgctgcgtgaaggcacctgcgattatcttggtttcagctattacatgaccaatgcagtgaaggccgaaggcggcaccggcgatgcgatctctggttttgaaggcagcgtaccaaacccgtatgttaaagcatctgactggggctggcagattgatccagtaggtctgcgctatgcactttgcgaactgtatgagcgttatcagaggccgctgtttattgtcgaaaacggttttggcgcttacgacaaagtggaagaagatggcagcatcaacgacgactaccgcattgactacctgcgcgcccatatcgaagagatgaaaaaagcggtgacttacgatggcgtggatctgatgggctacacaccgtggggctgcatcgactgcgtgagcttcaccaccgggcagtacagcaaacgctacggctttatctatgtgaataaacatgacgacggtactggcgatatgagccgtagtcgtaagaagagctttaactggtacaaagaggtgattgccagcaacggcgagaagctttaagtcgatgaagtaccggatgcaatacttgttgcatccggtcagacaacttccctgttttatttcccgcccgccaaatcgataaaacttcccgtgacgtaagaggctttatcacttagtagccagacaatggcctgcgcgacctcttctgcctgtccaccacgctgcatggggatgttgctcttaacgcgatcgacgcgtccaggctcgccgccgctggcgtgcatttcggtataaataaaccctggccgcacgcagttaacgcggatcccctgcgcggcgacttccaggcttagtccggtggttaacgtatcaatcgcccctttgcttgccgcgtaatcaacatattcccctgggctacccaaccgactggccacgctagagacattgacgatagcgccgccactgccaccatttttaagcgccatgcgttttaccgcctcgcggcagcagagaaaatatcccgtcacgttggtggaaagtactcggttgattcgctctgcggtaaggttttcaacggtgcactgggtaaacaagatcccggcgttattgaccagcgctgctagcggttcatcgtgctgatcgattgctgtaaacatcgcaacgacctggttttcgtcgctgatatccgcctggagcacgaatgctttgccaccggcttgcgttattaagttcatcacttcctgcgccgcgtggaggttttgctgataattaaccgccaccgtatacccttcttgcgccaacagtaatgcagttgcccgcccgatgccgcgactgccaccagtcacaagtgctatagccatttgtttttccgagaaaaattaattcgttgacgtatctttgagattgctaacaaactggctcaatcttcaatgttggcacgcttttccccctcgccctttcagggagagggccggggtgagggtaaatattcgcgccagtgccggcctgttcccctcaccctaaccctctccccaaaggggcgaggggactgtctgagcacttttgtactttgtcatctgactaaaaaggcgccgaagcgcctttagaaaatagtcgaatcagtgaattactggtattcgctaatcggtacgcaggagcagaacaggttacggtcgccgtaaacatcatccagacgtttcactgtcggccagtatttgtctgccacacctgccgggaataccgcaacttcacggctgtacggatgcgcccactcggcgaccagttcgctctgaatgtgcggcgcgttcaccagcgggttatcttccagcggccagacaccggctttcacctggtcaatttctgcgcggatagccagcatcgcgtcgataaagcgatccagttccactttgctttcagattcagtcggttcaaccatcagcgtacccgccaccgggaagctcatcgtcggcgcgtggaaaccgtagtcgatcaggcgcttggcaatatccagctcgctgatgccggtttcttctttcagcgggcgaatatcgagaatacattcgtgcgccacgcgaccgtcgcgaccggtatacagcaccgggaaggcatcctgcaggcggctggcaatatagttggcgttgaggattgccacctggcttgcttttttcagcccttctgcgcccatcatgcggatgtacatccagctgattggcaggatagaggcgctaccgaacggtgccgcagaaaccgcgccctgacgggttaacatgccttcgatttgcaccacgctatgacccggtacaaacggtgccaaatgcgctttcacgccgatcggtcccatacccggaccaccaccgccgtgcggaatgcagaaagttttatgtaggttaaggtgactaacgtccgcaccaataaagcccgggctggtgatgccaacctgggcgttcatgttcgcgccatcaaggtaaacctgaccgccgaactgatgcacgacttcacacacttcacggatcgtttcttcatacacgccgtgggtagaaggataagtcaccatgatacaggagaggttatcgcccgcctgttccgctttcgcgcgcagatcagtcagatcgatgttgccgtttttatcacacgccacaaccaccacctgcattcctgccatatgtgcagaagcggggttagttccgtgcgcagaagccgggatcaggcagatatcgcgatgcccttcgttgcggctttcatgataatgacgaatcgccagcaggcccgcgtattcgccctgtgcgccagagttcggctgcatacaaacggcgtcgtaaccggtcagtttcaccagccagtcagccagctgcgcaatcatctgctgataaccttcggcctgctccggcgggcagaacgggtgcagttcggcaaattccggccaggtgattgggatcatctcggcggcggcgttcagtttcatggtgcaggaacccagcgggatcatcgcctgattcagcgccagatctttacgctccaggctgtgcatatagcgcatcatttcggtttcgctgtggtagcgattaaacaccggatgggtgaggatttcgtcgtcgcgcagcatcgcaggctggatagagcggctgtcgtgagccacgtctttgtccagcgtgtcgatgtccaggccgtggttatcgcccagcagcacgttgaaaagctgcattacgttttcacgcgtggttgtttcatcaagggtgatcccaaccgcgttcagaatatcgctacgcaggttgatttcagccgcttcggcacgcgtcagtacgcccgctttgtcggccacttccacacacaaggtgtcgaaatagtgcgcatggcgcagtttcagacctttttgttgcaggcccgccgccaggatatcggtcagacggtgaatgcggttagcgatacgtttcaggccaaccgggccgtgataaacggcatacaggctggcgatgtttgccagcagtacctgggaagtacaaatgttggagttcgctttctcacggcggatatgttgctcgcgagtctgcatcgccatgcgcagcgcggtattgccagctgcatctttgcttacaccgataatacggcccggcatactgcgtttgtattcatctttcgccgcaaagaatgccgcgtgtgggccaccgtagcccatcggcacgccgaagcgttgcgcgctaccaaaaacaatatccgcgccctgtttacccggcgcagttaacagcaccagcgccataatatcggcggcaacgctgaccacaattttgcgacttttcagttcgctaataagcgcagtgtagtcgtgaatttcaccggtagtgcctacctgctgtaacagcacgccgaagacgtcctgatggtcgagcactttttgcgcgtcatcgacaatcacttcaaaaccaaaggtttcggcacgagtacggaccacatccagcgtttgcggatgcacatcggaagccacgaagaagcggttggcatttttcagtttgctgacgcgtttcgccatcgccattgcttcggcggcagcggtggcctcgtccagaagagaagcagaggccatatccagtccagtcaaatccagcgttacctgctggaagttgagcagtgcttcaaggcggccctgggagacttcaggttgatacggagtgtacgcggtataccagcccggattttccagcatgttacgcaggataaccggcggtagctgcacggcggtgtaacccatgccgatgtaagacgtgaagcgtttattgcgactggcaatagccttgagttctgccagtgcggcgtattcggtcgccggtgcgccaacctgcggtggtgtcgcaagttgaatatctttcggcacaatctggccggtcagcgcgtttaagctttgtgcaccaacggcattcagcatttcttgctgttgcgcggcgtccggtccgatatggcgttcaataaaagcgccgctgttttcaagctggcttaacgtctgtgtcatgagcgatggttcctgaaacgtgcagtgaattgtgaacctctctccttacgaagagagtgagggtgaggcataaattttcctcaccctgatcctctcccgcagaagaggaataaagccgttactcgtcttctaacaatgcttcgtatgcggtcgcatccagcagactttccagttcgctttcatcgctggctttgattttaaagatccagccgcctgcatacggttcgctgttcaccagttccggggaatcgctcagtgcgtcgtttaccgccacgatttcaccgcttactggcgcataaatgtcactcgccgcttttacgctttcggcaaccgcgcagtcatcgcccgcgctaaccgttgcgcccacttccggcaggtcaacaaacaccatatcgcctaacagctcctgagcatgttcggtaataccaacggtgtaagtgccgtcggcttctttacgcagccattcgtgttctttgctgtatttcagttctgctggtacgttgctcatcaatcaatctccaaaaaagtaaatcacgcgacggctttgccgttacgcacaaaaacaggttttgtcactttaaccggcatttcacggttgcgaatttgcacaatcgccgtttcgccaataccttccggcacgcgcgccagcgcaatgctgtaacccagcgtcggggagaaagtaccgctggtgataatgccttcatgctggttgccctgcgcatcggtaaagcgtaccggcagttcattacgcagcacgcctttttcggtcatcaccagaccaaccagtttttctgtaccatgctcacgctgcacttccagggcttcacgaccgataaagtcacgatctgccggttcccaggcgatggtccagcccatgttggcggctaaaggagagatggtttcgtccatctcctgaccataaagattcatgcccgcttccagacgcagcgtgtcacgcgcgcccaagccacatggcttaacacccgcttccaccagcgcacgccagaaatcggccgctttttcattgggcagcgcaatttcatagcccgcttcaccggtataaccagtggtggcaataaacagatcgcccgcctgcacgccaaagaacggtttcatcccttccaccgcctgacgctgggcgtcattaaacagtgtggcagcttttgcctgcgcattcggcccttgcacggcaatcatggaaaggtcatcacgaacggtaatttcgatgccgaaaggttcagcgtgttgggtaatccaggagaggtctttttcgcgggtggcggagttaacaacgaggcggaagaaatcttcagtaaagtagtagacgatgaggtcatctatcacaccgccagaggcattcaacatcccgctgtaaagggctttgccgcttttggtgagcttcgccacatcgttcgccagcagataacgcagaaactcccgggtgcggctgccgcgaagatcgacgatggtcatatgactcacatcaaacattccggcatcggtacgtaccgcatgatgttcgtcgatttggctaccgtaatgcagcggcatcatccagccgtggaaatccaccatgcgagcgccgcaaagcgtgtgttgttcgtacaaaggagtctgttgtgccatcttgtcctcattgaataagcggggctgacaactttttcatggtgaaattatcaccacgaaacccagcatcggagccactcccggtccccaacgcaatcgttctcttttgcctgaacttaccaccgaaacagactgttaaccataaggtaaaattgatcatcacattagcttatggttaaaaaatgcaaaaatcgcgacagaataaaaaaccaaaaaatacaccagtttctatacaaagatgatgtgatgagaaagtcaatttgaataagacaatattaagagctaaaaaaatgtcaaaaaacactaaatcaaaaaataatggcattagaaaatataatgcgaaaacggaggtgaaattagtttatttcaaatgaggaaaatctcccggcgaaaaaaccgggagatgaaagtgtgatgggtatcaaataaacaacagaggagaaatttttaacgcagccattcaggcaaatcgtttaatcccattgcctggcggataagttgcggcttaacgccaggaagcgtgtcggccagtttcaaaccaatatcacgcagcagttttttcgccggattggtaccggaaaacagatcgcggaatccctgcataccagccagcatcaacgccgcactgtgcttgcggctacgctcatagcgacgcagataaatgtactgcccgatgtctttcccctgacgatgcaaccgtttcagttcggcaatcagctctgcagcatccataaagccgagatttaccccctgccccgccagcgggtgaatggtatgtgcggcgtcgcccaccagcgccagacggtggctggcaaactggcgcgcataacgccccgtcagtgggaacacctgacgcgcgctctcaaccttgcataagcccaggcgattatcaaaagcgatatttaacgcgcgattaaattcgtcttcacttgcctgctgcatccgctgcgcttcctctgggctcagactccagacaatgctgcaaagatgcggatcgctaagcggtaaaaaggccagaatgccttcgccatggaaaacctgccgcgccaccgcatcatgcggttcttccgtgcgaatggtcgctaccagcgcgtgatgctgataatcccagaaagtcagcggaatatcggctttgttgcgcaaccaggaattagcgccgtccgcgccaatcaccagacgcgccgttaacatgctgccatctttcagcgtcaggaaggtttcattttctccccaggcgacctgctgtaattctgcgggggctaacagagtgatatcactgctctgatgcgctttgttccacagcgcgtagtgaatcacactattttcaacgatatgcccaagatggctatagcccatgctttgatcgtcaaagctaatgtgaccaaagctgtctttgtcccacacttccataccgtgataacagctggccctacgagagagaatgtcctgccagacgccaagacgggtgagtaatttttcgctggcggcattgatagcgctaacgcgcagttgtggtggtgcattcgccgccagaggttcctgtacgcgctgctccagtacggcaacgcgtaagccgctcccctgtaagccacaggcaaccgccagccccaccatgccgccgccaacaatggctacatcaacactttgcattgtttattccttaaaaccgccttcaacgcgccacccaaccgagggtgcgctgcgccagcacatcgcgtgccggggtgaataattccatcgtcatcagcccgatgttgcgcccgacaaccagcggtgcccaacggttggcaaaaagatgtacaaggctgtccgtgacgccaatggttgcttcgcgatcgctctgtcgacgctgctgataacggcacaatacgccgtaatcccccatgtcttctccgcgctcctgcgcctgagtcagggtttccgcaagactcatcacatctcgcataccgaggttaaacccttgcccggcaatcgggtgcagagtttgcgccgcattgcccaccagcacggtacgatgggtaatagatctggcggcgtgggttaacgccagcggataagcactgcgtttaccagcgtgggtaattttcccaagtcgccagccaaaggcgctctggagttcacggcaaaacttctcgtcactccagctcaacacctcttcgcgccgttccagtggatgacaccagaccaggctacagcgtccgtcagacatcggcaacatcgccagcgggccatgttgcgtaaagcgttcaaaagcgcgcccttcatgcgcaacggaagtagcaacgttggcaatcacggccagttgttcgtaaggctcctgctgccagtcaacgccgcacgcggtggctaacgcactatgggtgccatcagctgctaccagcacgcggcccgtcagcgtctcgccactctccagcgtcacttcaacgtgactctgagtacgggcaacgttagccacgcgatcagggcaatgcagcgttacgccaggtgctttacgcagcaatgcaaacagccgttgcccgacattgtgcaattcgacaacctgtcccagcgccgccagttggtaatcttctgcggcgagggtgacaaatccagcgtgaccacgatcgctgacatgcacggtggtgatggcagttgcgcaatccgccagagattgccagacgccgatgcgcgccagttgctgacaggtacccgccgccagcgctatcgctcgtccatcaaagcccggatgagcatgactctctggcgcagtcgcttcaatcaaatgtaccggcagcgccccgtgacttaaccgggaaatagccagcgccagcgtcgcgcccgccatgccgccaccgacgatgattacgctcattgctttctcgcagcaaccatcaacgcttcgatttcttccggctttttcaccacgctggcggtgaggttttcgttaccggtttcggtaatcacaatgtcgtcttcaatacgaatgccgataccgcgatattgttctggcacttctgcatccggcgcaatatacagccctggctctacggtcagtaccatgcccggttccagaatgcggctgcgatcctgaccataaacacccacgtcatggacatccagtcctaaccagtggctaaggccatgcataaagaaaggacgatgggcgttctgagcgatcagttcatcaacatcacctttcaggatgccgagttttaccaggccgctaaccatgatgcgcaccacttcaccagtgacttccagaatggaagttcccggacgatacaggcgcaggctggtttcgagagactccagcacaatgtcgtagatttcacgctgggcctgggtgaatttgccgttgaccgggaaggtgcgggtaatatcgccagcgtaacctttgtattcacaacccgcgtcaatcaacaccaggtcgccgtcgcgcatttcacactcgttttcggtgtagtgcagaatgcagccgttttcaccgctgccgacaatggtgttataggacggatagcgcgcaccgtggcggttaaattcgtggtgaatttcgccttccagatggtactcgaacattcccggacggcatttttccatcgcccgtgtatgtgccatggcggtgatttctcccgcgcggcggagtacggcaatctcttctgggcttttgaacaggcgcatttcatgaacaacaggacgccagtcgatcatcgttgccggtgcggtgagattttgccggctacctttacgcagtttttccagcgcactgttcacgattacatcagcatatgcatattcgccctgggcatggtaaaccacatccaggccgttaagtagttgataaagttgctgattgatttcgctgaatgccagtgcgcggtcaacgcccagtttctctggcgcggcatcctggcctaagcgacggccaaaccagatctccgccgtcaggtcgcgaacgcggttaaacagaacgctgtggttatgagtgtcatcgcttttaatcagcaccagcaccgcttccggttcgttaaagccggtgaagtaccagaagtcactgttctgacgataggggtattcgctgtcggcgctacgtgttacttctggtgcagcaaaaatcagcgcggcgctgccgggttgcatttgctccaccagggcctgacggcgacgctgaaactcttgccgggatatctcactcataacactctccttacgttttttgtttttagtgtagagtcggtttttgtacttctggcgcggtcggttgcggatgagtaaaggtgtcgtggcataacagcgcggcaacacgaacgtattcgatgatctcttcaaggctcatttcaagctcttcctgatcttcgtcttcgtcgtaacccagttgcgcaatgttacgcagatcgtcgatagcttcaccggtttcgccggtcactttatccagcttcggttgcgtaacgccaagaccaagcaggaagtgattgacccaacctgccaatgcatcagcccgatcgaaaacgctgacatcatcgccatcaggcagataaagctgaaaaaggaagccgtcatcctgcagggcatcgctggtggcagagtgcattttacgcagtgcctgtgccagctcatgaccgaaagccatgccttcgttcgtcaggtcgtgaagtagcggtagccaactgctgtcatcgttaccgccacatatcatcccgctgattaaaccatgcatctcagctggggtcagacccgtcccttgttggttcagatactggttcatttcgttgtaaccaggcatttcgttctgtatagacataagcattcgtcgtcaaagggaggaatattcatgatatgctaccactttgggccctggtggaccagaaaagggcttgtctcttctcatcagggtagctatagtgtcgccccttcgcagaccatgggtctaaagacgaaggcagcgcagtcaatcagcaggaaggtggcatgtctgcacaacccgtcgatatccaaatttttggccgtagtctgcgtgtgaactgcccgcctgaccaaagggatgcgttgaatcaggcagcggacgatctgaaccaacggttgcaagatctgaaagaacgcactagagtcacaaatactgaacagttggtcttcattgccgcattgaatatcagctatgagttagcgcaagaaaaagcaaagactcgtgactacgcggcaagtatggaacagcgtattcggatgctgcagcagaccatagaacaagcgttacttgaacaaggtcgcatcaccgaaaaaactaaccaaaactttgaatgacacttttcggtttactgtggtagagtaaccgtgaagacaaaatttctctgagatgttcgcaagcgggccagtcccctgagccgatatttcataccacaagaatgtggcgctccgcggttggtgagcatgctcggtccgtccgagaagccttaaaactgcgacgacacattcaccttgaaccaagggttcaagggttacagcctgcggcggcatctcggagattcccttcttatctggcaccagccatgacgcaactaccagaactcccactgacattatcccgacaagaaatccgcaaaatgattcggcaacgtcgtcgtgcgttaacgccggaacaacagcaggaaatgggtcaacaagccgctacccggatgatgacttatcccccggtggtgatggcacatacggtcgctgtattcctctcttttgatggcgaactcgacacccagccactcatagaacaactctggcgcgccggtaagcgcgtatatcttccagttttgcatccctttagtgccggtaatttgctgttcctgaattaccatccgcaaagcgaactggtgatgaacaggttgaagatccatgagccaaaattggatgtgcgtgacgtgctacccctttcccgattagacgtgctgatcacaccgctggtcgcctttgatgagtacggtcagcgcctgggaatgggcggtggtttttatgatcggaccttacaaaactggcagcactataaaacgcaaccggtgggttatgcgcatgattgtcagttggtggaaaaactccccgttgaagagtgggatatccctcttcctgcggtggttacaccgagcaaagtctgggagtggtaagggcgatacacccgcatcgccctgattgacatcgttgattctttgacctaatttagtgagtaagggtaagggaggattgctcctcccctgagactgactgttaataagcgctgaaacttatgagtaacagtacaatcagtatgatgacaagtcgcatcataacccttctccttcaagccctcgcttcggtgagggctttaccgttacagccccatgctgccctgccatcgtaaatccccattaaataaacacaacgcattgatctgactttgatttattttctggagcagactcgcaaagtagaatgcgcaacgcggcaacggtgtggagaagggataaaaaaacgggcaagtcagtgacctgcccgttgattttcagagaaggggaattagtacagcagacgggcgcgaatggtacccggaatagctttcattgcctgcagcgctttttcggcaacgtcttcgtcggcttcaatatcaataaccacataacccatctgggcggaagtttgcagatattgcgcggcgatgttgacgccctgctcggcgaagattttgttcagcgcagttagcacgcccggacggttttcgtggatgtgcatcagacgacgcccaccgtgcagtggcaggctgacttccgggaagttcaccgcagagagcgtactgccattgtcagaatacttgatcaatttacccgcaacttccaggccgatattctcctgcgcttcctgagtgctaccgccaatgtgtggcgtcagaaggacgttgtcgaattcacacagcggagaggtaaatggatcgctattggtcgccggttccgtcgggaatacgtcgattgccgcccccgccagatgtttgctcgccagcgcatcacacagcgccggaatatccaccacagtaccgcggctagcattaatcagcaggctgccgggcttcattagactaatttctttcgcgcccatcatatttttggtggacggattctctggtacatgcagactcaccacatcgctcatattcagcaggtcagaaagatgctgtacctgagtggcgttgcccagcggcagtttattttcaatatcataaaagtaaacatacattcccaggctttcagccagaatgcccaattgcgtaccaatatgaccgtagccgatgatacccagctttttgccgcgcgcttcaaaagaacccgccgccagtttgttccacacgccacggtgcgctttagcattggcttccggcacgccgcgcaatagcagcagcagttcgccaatcaccagctccgcaacagagcgcgtattactgaacggtgcgttaaataccgggatcccgcgctttgccgccgcatccagatcaacctggtttgttccgatacagaaacagccaatagcgaccagtttttctgcggcgttgatcacgtcttcagtcagatgggtacgggatcgcaggccgatgaagtgggcatcgcggatggattcttttaattgttcatcatccagcgcgcctttgtgaaattcgatgttggtgtaaccagctgcacgaaggctttccagcgccttttggtgcacgccttctaccagcagaaacttaatcttgtctttctccaggcttacctttgccatttacccaatcctgtcttttgaaatgttgtgtgcggatttgcatccgcctttcaacatatcaaaaaataatattgcggcaatatgaacgtttgcgtcgcgatgttgaggaaatatcacgcaaaggtaattcttggatgaatatgctggtttagaggatttatttagagcaatcgacaattgcctggtaaaagcgtgacacatgtcaccaaatttaatgaagagaatttttttaacgggggaggttcccccgtcagatcatttcacaatggttttgacaccgtcaggtgtgccaatcagcgcaacgtccgcgccacggttagcaaacaagccaacagtcaccacgccaggaatcgcatttatggcgttttccatcgctatcgggtcaaggatttccatgccgtggacgtcgaggatcacgttgccattatcggtcaccacgccctgacggtattccggacgaccgcccagtttcaccagctgacgcgccactgcactacgtgccatcgggataacttctactggcagcgggaatttacccagaatatcaacctgcttggaagcgtctgcaatacagataaatttttctgcaacgctagcaatgattttttcacgggtcagcgccgcgccgccgcctttgatcatttgcatgtggccgttgatttcatctgcgccatcaacgtagatgccaaggctgtcgacttcgttgagatcaaaaacgtgaatgccgaggcttttcagtttttcagtggaagcatcactactggaaacggccccttcaatctggcctttcattgtaccgagcgcgtcaataaagtgtgcggcggtggaacctgtacctacaccaacaatggtgccgggctgaacatactgaagtgccgcccatcctactgcttttttcaattcatcctgcgtcatgatcgtttcgcctgtggtatgaaatttcacacgcattatatacaaaaaaagcgattcagaccccgttggcaagccgcgtggttaactcatccataaaatatcgcgcaatggcaggcatcccctttcgccccgcaaataaagcatacaacggtctgggtatgccgctccacggtgcaaacaggcgcaccagttcaccgttcgcaagcccctgtttacaggcaaattgaggcaataacgccacgccattcaacacaaccagggcgcgaactcgctgagcgaaatgcattagcgcaaatccctgatcttttaagctgcgcttttaaccacggatacaaatgttacccgccgacggcttcggtatatgcaacctgacacaaaattgtgtcatagtgcaggaaaaagcatttaccaggagcagacaacagcaatgaaacgcccggactacagaacattacaggcactggatgcggtgatacgtgaacgaggatttgagcgcgcggcacaaaagctgtgcattacacaaagtgccgtcagtcagcgcattaagcaactggaaaatatgttcgggcagccgctgttggtgcgtaccgtaccgccgcgcccgacggaacaagggcaaaaactgctggcactgctgcgccaggtggagttgctggaagaagagtggctgggcgatgaacaaaccggtagcactccgctgctgcttagtctggcggtcaacgccgacagtctggcgacgtggttgcttcctgcactggctcctgtgttggctgatagccctatccgcctcaacttgcaggtagaagatgaaacccgcactcaggaacgtctgcgccgcggcgaagtggtcggcgcggtgagtattcaacatcaggcgctgccgagttgtcttgtcgataaacttggtgcgctcgactatctgttcgtcagcagtaaaccctttgccgaaaaatatttccctaacggcgtaacgcgtagcgcattactgaaagcgccagtggtcgcgtttgaccatcttgacgatatgcaccaggcctttttgcagcaaaacttcgatctgcctccaggcagcgtgccctgccatatcgttaattctagtgaagcgttcgtacaacttgctcgccagggcaccacctgctgtatgatcccgcacctgcaaatcgagaaagagctggccagcggtgaactgattgacttaacgcctgggctatttcaacgacggatgctctactggcaccgctttgctcctgaaagccgcatgatgcgtaaagtcactgatgcgttactcgattatggtcacaaagtccttcgtcaggattaatccatcaaataatgcctgatagcacatatcaggcgttgtcctcacttctttttgtattccttgaatcacatcacaaaatagacaaatctcaggcggcaaaaaacgacgtctgaatgcattttttttgctggcgacaaacccacgtaaaaagctcaccgtaggcgcaaataccctcattttgattgcgttttacggagcaaataatgtctaacgtgcaggagtggcaacagcttgccaacaaggaattgagccgtcgggagaaaactgtcgacagcctggttcatcaaaccgcggaagggatcgccatcaagccgctgtataccgaagccgatctcgataatctggaggtgacaggtacccttcctggtttgccgccctacgttcgtggcccgcgtgccactatgtataccgcccaaccgtggaccatccgtcagtatgctggttttagtacagcaaaagagtccaacgctttttatcgccgtaacctggccgccgggcaaaaaggtctttccgttgcgtttgaccttgccacccaccgtggctacgactccgataacccgcgcgtggcgggcgacgtcggcaaagcgggcgtcgctatcgacaccgtggaagatatgaaagtcctgttcgaccagatcccgctggataaaatgagcgttagcatgaccatgaatggcgcagtgctaccagtactggcgttttatatcgtcgccgcagaagagcaaggtgttacacctgataaactgaccggcaccattcaaaacgatattctcaaagagtacctctgccgcaacacctatatttacccaccaaaaccgagtatgcgcattatcgccgacatcatcgcctggtgttccggcaacatgccgcgatttaataccatcagtatcagcggttaccacatgggtgaagcgggtgccaactgcgtgcagcaggtagcatttacgctcgctgatgggattgagtacatcaaagcagcaatctctgccggactgaaaattgatgacttcgctcctcgcctgagcttcttcttcggcatcggcatggatctgtttatgaacgtcgccatgttgcgtgcggcacgttatttatggagcgaagcggtcagtggatttggcgcacaggacccgaaaagtctggcgctgcgtacccactgccagaccagtggctggagcctgactgaacaggatccgtataacaacgttatccgcaccaccattgaagcgctggctgcgacgctgggcggtactcagagtctgcataccaacgcctttgacgaagcgcttggtttgcctaccgatttcagtgcacgcattgcccgcaacacccagatcatcatccaggaagaaagtgaactctgccgcaccgtcgatccactggccggatcctattacattgagagcctgaccgatcaaatcgtcaaacaagccagagctattatccaacagatcgacgaagccggtggcatggcgaaagcgatcgaagcaggtctgccaaaacgaatgatcgaagaggccagtgcgcgcgaacagagcctgatcgaccagggcaagcgtgtcatcgttggtgtcaacaagtacaaactggatcacgaagacgaaaccgatgtacttgagatcgacaacgtgatggtgcgtaacgagcaaattgctagcctggaacgcattcgcgccacccgtgatgatgccgccgtaaccgccgcgttgaacgccctgactcacgccgcacagcataacgaaaacctgctggctgccgctgttaatgccgctcgcgttcgcgccaccctgggtgaaatttccgatgcgctggaagtcgctttcgaccgttatctggtgccaagccagtgtgttaccggcgtgattgcgcaaagctatcatcagtctgagaaaagcgcctccgagttcgatgccattgttgcgcaaacggagcagttccttgccgacaatggtcgtcgcccgcgcattctgatcgctaagatgggccaggatggacacgatcgcggcgcgaaagtgatcgccagcgcctattccgatctcggtttcgacgtagatttaagcccgatgttctctacacctgaagagatcgcccgcctggccgtagaaaacgacgttcacgtagtgggcgcatccagtctggctgccggtcataaaacgctgatcccggaactggtcgaagcgctgaaaaaatggggacgcgaagatatctgcgtggtcgcgggtggcgtcattccgccgcaggattacgccttcctgcaagagcgcggcgtggcggcgatttatggtccaggtacacctatgctcgacagtgtgcgcgacgtactgaatctgataagccagcatcatgattaatgaagccacgctggcagaaagtattcgccgcttacgtcagggtgagcgtgccacactcgcccaggccatgacgctggtggaaagccgtcacccgcgtcatcaggcactaagtacgcagctgcttgatgccattatgccgtactgcggtaacaccctgcgactgggcgttaccggcacccccggcgcggggaaaagtacctttcttgaggcctttggcatgttgttgattcgagagggattaaaggtcgcggttattgcggtcgatcccagcagcccggtcactggcggtagcattctcggggataaaacccgcatgaatgacctggcgcgtgccgaagcggcgtttattcgcccggtaccatcctccggtcatctgggcggtgccagtcagcgagcgcgggaattaatgctgttatgcgaagcagcgggttatgacgtagtgattgtcgaaacggttggcgtcgggcagagcgaaacagaagtcgcccgcatggtggactgttttatcagcttgcaaattgccggtggcggcgatgatctgcagggcattaaaaaagggctgatggaagtggctgatctgatcgttatcaacaaagacgatggcgataaccataccaatgtcgccattgcccggcatatgtacgagagtgccctgcatattctgcgacgtaaatacgacgaatggcagccacgggttctgacttgtagcgcactggaaaaacgtggaatcgatgagatctggcacgccatcatcgacttcaaaaccgcgctaactgccagtggtcgtttacaacaagtgcggcaacaacaaagcgtggaatggctgcgtaagcagaccgaagaagaagtactgaatcacctgttcgcgaatgaagatttcgatcgctattaccgccagacgcttttagcggtcaaaaacaatacgctcagtccgcgcaccggcctgcggcagctcagtgaatttatccagacgcaatattttgattaaaggaatttttatgtcttatcagtatgttaacgttgtcactatcaacaaagtggcggtcattgagtttaactatggccgaaaacttaatgccttaagtaaagtctttattgatgatcttatgcaggcgttaagcgatctcaaccggccggaaattcgctgtatcattttgcgcgcaccgagtggatccaaagtcttctccgcaggtcacgatattcacgaactgccgtctggcggtcgcgatccgctctcctatgatgatccattgcgtcaaatcacccgcatgatccaaaaattcccgaaaccgatcattagcatggtggaaggtagtgtttggggtggcgcatttgaaatgatcatgagttccgatctgatcatcgccgccagtaccagtaccttcagtatgacgcctgtaaacctcggcgtcccgtataacctggtcggcattcacaacctgacccgcgacgcgggcttccacattgtcaaagagctgatttttaccgctagcccaatcaccgcccagcgcgcgctggctgtcggcatcctcaaccatgttgtggaagtggaagaactggaagatttcaccttacaaatggcgcaccacatctctgagaaagcgccgttagccattgccgttatcaaagaagagctgcgtgtactgggcgaagcacacaccatgaactccgatgaatttgaacgtattcaggggatgcgccgcgcggtgtatgacagcgaagattaccaggaagggatgaacgctttcctcgaaaaacgtaaacctaatttcgttggtcattaatccctgcgaacgaaggagtaaaaatggaaactcagtggacaaggatgaccgccaatgaagcggcagaaattatccagcataacgacatggtggcatttagcggctttaccccggcgggtagcccgaaagccctacccaccgcgattgcccgcagagctaacgaacagcatgaggccaaaaagccgtatcaaattcgccttctgacgggtgcgagtatcagcgccgccgctgacgatgtactttctgacgccgatgctgtttcctggcgtgcgccatatcaaacaagctccggtttacgtaaaaagatcaatcagggcgcggtgagtttcgttgacctgcatttgagcgaagtggcgcaaatggtcaattacggtttcttcggcgacattgatgttgccgtcattgaagcaagcgcactggcaccggatggtcgagtctggttaaccagcgggatcggtaatgcgccgacctggctgctgcgggcgaagaaagtgatcattgaactcaatcactatcacgatccgcgcgttgcagaactggcggatattgtgattcctggcgcgccaccgcggcgcaatagcgtgagcatcttccatgcaatggatcgcgtcggtacccgctatgtgcaaatcgatccgaaaaagattgtcgccgtcgtggaaaccaacttgcccgacgccggtaatatgctggataagcaaaatcccatgtgccagcagattgccgataacgtggtcacgttcttattgcaggaaatggcgcatgggcgtattccgccggaatttctgccgctgcaaagtggcgtgggcaatatcaataatgcggtaatggcgcgtctgggggaaaacccggtaattcctccgtttatgatgtatagcgaagtgctacaggaaagcgtggtgcatttactggaaaccggcaaaatcagcggggccagcgcctccagcctgacaatcagcgccgattccctgcgcaagatttacgacaatatggattactttgccagccgcattgtgttgcgtccgcaggagatttccaataacccggaaatcatccgtcgtctgggcgtcatcgctctgaacgtcggcctggagtttgatatttacgggcatgccaacagtacacacgtagccggggtcgatctgatgaacggcatcggcggcagcggtgattttgaacgcaacgcgtatctgagcatctttatggccccgagcattgctaaagaaggcaagatcagtaccgtcgtgccaatgtgcagccatgttgatcacagcgaacacagcgtcaaagtgatcatcaccgaacaagggatcgccgatctgcgcggtctttccccgcttcaacgcgcccgcactatcattgataattgtgcacatcctatgtatcgggattatctgcatcgctatctggaaaatgcgcctggcggacatattcaccacgatcttagccacgtcttcgacttacaccgtaatttaattgcaaccggcagcatgctgggttaatgactcgtcccgtcacgatcttcagcaatatgctgaagcatcgtggcggtataacgatgatttctgatactataaagatattcctgcatatacatcggcctgtgcggtgcatcaaaatatttcagcgttgccggattcaccagtcgccaggcaaaatgcgggatcaccgtcagaaaatgtccgcgctccacggcgctgattttggccataaaactgtagggacgataaataatggttggattgatcccacaaggtcgcatattcgcatcaatcattgcttcgaagttggcccggttctgaaagcgcatttgtagccagggcagctcctgaagcagctcttgctcttgtcgctcttcataacggcgagaaacgagaaagcctaatcgcagcggtggtagttcactgatagtcaggttttccagttcctgaactcgtgcagatacatgctgtggggagataataaaatctaactggcggtcaaaaagattatcgataacgccattttcgctgaactcaactggctgggcggtcacgccttcatacttatctccgagactaatcaactgatcgaaaataattgtcggataagtattatctatgccaatcacaatttctcgactacgacgcccactgttatggatttcattatcaatcgcagaaagccgttgataaaccgggaacagtttttgatacagttcctgtccggctttattgaggctgatattattatctttgcgggtaaatagcgtatagccaatttgttcttccagcgcggcaatgcttttaccaaatgggctagccgtcatatggattttttctgccgcccgggcaatattattggtttgcgctaataaaatgaaattgcgcatctttttgctaataaaaatgtccatccccctcccccgcatccttgtccgcttaaccgtttcagtcagcctatccttgatgaaaccgcgagcaaagataggtgattacgtcatggttttacagaaaattacagaaaaaggaggcaatatcgggtaaaggcattagcccgacgaatacgtcgggctacaaatattattgtgctgcaggtgttttagcgggttgttgatccacaggttctaactggaagaccacatcgacctgatcatcaaactgaatagcggcctgctcgtaagtttcctgggcggacaccggcgcggcatcggctttcatcatccgcaccattgggctgggctgatagttggaaacatggtagcgcacgctatataccggccccagtttacgatgaaagccgttcgccagttcctgcgcctgatgaatcgcgttatcaatcgctgccttacgcgctttgtctttataggcatccggctgcgccacgcccaggctcacagaacgaatttcgttaagacccgccttcagcgcgccatccagcaaggaattcagtttgtctaactgacggagcgtgacttccaccgttctcacagcgcggtagcctttaaggatacttttaccatcctgataatcataatctggctgggtgcgtaagttcgcactgctgatatcttttttcgcgatctgattgagttcaaggaaggaaatgtattgtgcgacgcgctcatctgcctgtttcttggcagtagcggcatccttcgcggccacgttaacttcaatcgcaagagtggcaatgtctggcaccgcatccacgcttgccgtaccggaggtgacaatatgcggtccatccggcaattcgttagcctgcgctgccatcccgctaatacccattaatgccgccagggcgataactttgaacttcacgttagtctctccgtgttaattgacttgcccaaaattcaggacctctggaggcaagcttagcgcctctgttttatttttccatcagatagcgcttaactgaacaaggcttgtgcatgagcaataccgtctctcgccagctgcaaggcaataaaccacataacacatcccacaaccagattgataatgcgctgtgcttttgccgtgcgcagacgcggtgccagccaggctgcgagaagagccagaccaaagaaccacaggaaagaggcgctaattgtcccgagtgcaaaccagcgttttggttccacatcaagttgcccgccaaggctgcccagtacaacaaaagtatccaggtaaacatgcggattcagccaggtcactgccaacatggtggcgataattttccatctgccttgcttcatgacttcggcgctggctaactcaatattactgctcattgctgttttaaaagcgccaaaaccataccacagcaagaaggctacgccgccccaggtgaccagcgccagcaaccacgggctctgcatcaataacgcgctgccaccaaaaatcccggcgcaaatcaggaccaaatcgctgatagcacaaagtaaggcaatcataatgtggtactgacgacgtatgccctgattcatcacaaaagcattttgtggaccgagcggtaggatcatagccgccccaagtgcaagaccttgaaagtaataagaaaacacgttggatattccgaattaagtatctgatgcagagactatatcgcgggattgttattagcggaaattgataatattaattggcaatcagaaaaactaataagagagaggccagagagtattatctggcctcagcgttgattacgcagctttgtcttctttcacccgcttaaagttcacatccatttgcgggtacgggaagctgataccggcggcatcaaattcacgtttaatacgctccagcacatcccagtacacgttttgcagatcgccgctgttgctccagacgcggaccacgaaattaatgctgcttgcaccaagttcgttcaggcgcacagtcatttcgcgatctttcaaaatgcgatcttcagactggataatattggtcaggatctgcttaacctgatcgatatcggaatcatacgccacgccaataataaattcgttacggcgaactggctcgcgggagaagttaataatatttccggcaataattttaccgttcggaataacgataattttaccgtctgcagtacgcatggtggtggagaaaatctgcacactcagcacagtaccggctacgccgcccaggtcaacatattctccggcacggaacgggcggaacatgacaagtaacacgccagcggccaggttagacagactcccctgcaaagccagaccaacagctaagcctgcggcaccgagtacagcaatgacactcgcggtttgtacacccacgcgtcccagtgcagcgattagcgtaaaggcgataataccgtaacggactaatgcagaaagaaaatcagcaacagtggcatcgattttacgggagatcatcaggcgattcaccgcgttggaaatcatccgcgcgataatcaaaccaacgatgatgatcgcgagtgccgccacgatgtttactgcataacttagcagcagcgcctggttagctaccagccagcttcccgcgccgtttatgctatcgacaacattcaaatcttccattcaatattccttttcaactgactcaaaatggagaaatacactccgccgccttatgacgggcagtctgacaagggtaaacaataaagcataattttgccaaatagatcacagatttctcatctgaatcaccttgcttttggcgaaaaaatccccgcagagcggggctcagacagatatcaatgtgcgctttgtcatgccggatgcggcgtgaacgccttatccggcctacaaaaacctgcaaattcaatatattgcaggatacgtgtaggcctgataagcgtagcgcatcaggcaattttgcttttggcgaaaaaaagacccgcagagcgggccttgagataagcagaaaggaatatcttacagaacgtcgatcgcgttcagttcctggaatgctttctccagacgagcgatcatgctagtctgaccggcacgcagccatacgcgcggatcgtagtatttcttgttcggctgatcttcgcctttcgggttacccagctgaccctgcagataagcttcgttcgctttgtagtagttcagaacgccttcccaggttgcccattgggtatcggtatcgatgttcatttttactacgccgtagcttacggagtctttgatttcctgagcagtagaaccggaaccaccgtggaatacgaagttcaggctgttgtgcggcaggttgtgtttcttggaaacatattcctgagaatcacgcaggatggtcggagtcagaaccacgttacccggcttgtaaacaccgtgtacgttaccgaaggacgctgcgatggtgaaacgcgggctgattttgctcagttcggtgtatgcgtaatcaacgtcttccggctgggtgtacagtgcagaagcgtccatgtggctgttgtccacgccgtcttcttcaccaccggtgcaacccagttcgatttccagagtcatgccgattttggacatgcgctccaggtatttagagcagatttcgatgttctcttgcagagattcttcagacaggtcgatcatgtgagaagagaacagcggcttaccggtagctgcgaagtgtttttcacccgcgtccaacagaccgtcgatccacggcagcagtttcttcgcgcagtggtcagtgtgcaggataaccggaacaccataatgttcagccatctggtgaacgtgatgcgcaccagagatcgcgcccaggatagcagcaccctgcggaacgtcagatttcacgcctttaccagcgataaaggaagcaccaccgttggagaactgaacgataaccggcgctttaactttagcagcggtttccagtacggcgttgatggagtcagtaccgacgcagtttactgctggcagtgcgaagttgttttcttttgctacctggaaaactttctgtacgtcatcaccagtgattacgccaggttttacgaaatcaaaaatcttagacatgtctcttgtcctgtatcgtcgggccttatactcgtcatacttcaagttgcatgtgctgcgtctgcgttcgctcaccccagtcacttacttatgtaagctcctggggattcactctcttgtcgccttcctgcaactcgaattatttagagtatgaaaaattgcgtgctctaaaagcgcgctgaaacaagggcaggtttccctgccctgtgattttttacttcttagcgcgctcttcgagcatcgctactgcaggcagtactttaccttccacgaattcgaggaatgcgccgccgccagtggagatgtaggagattttgtcagcaatgccgaacaggtcgattgctgccagagtgtcgccgccgccagcgatggagaacgcttcgctgtctgcgatagcgttagccacgatttcagtacctttgcggaagttcgggaattcgaacacgccaaccggaccgttccacagaatggttttcgcattcttcaggatttcagccagttcctgagcggaagcatcaccgatatccaggatctgctcgtcagctttcacatcgttaacagatttcagggtagccggtgcagtttcagagaactcggttgctacgcgaacatcagacggaaccgggatgttgcaggtggtcagcagacgtttagcttcgtcaaccaggtcagcttcgtacagggatttacccacatcgtggccttgtgccgcgataaaggtgttagcgataccaccaccaacaatcagctggtcagcgattttagacagggagtccagaacggtcagtttggtagatactttagaaccaccaacgatagccaccatcgggcgagcaggttctttcagtgctttacccagcgcgtccagttcagctgccagcagcgggcctgcgcacgcaacgtcagcgaatttaccgataccgtgagtagaagcctgcgcgcggtgagcagtaccgaatgcgtccattacgaacacgtcacacagtgcagcgtattttttggacagggtttcgtcgtctttcttctcgcctttgttgaagcgaacgttttccagaacaaccagttcaccttcagcaacgtcaacgccgtcgaggtaatctttaaccagacgaaccgggttagacagtttgtctttcaggtagttaacaaccggcagcagagagaattcttcgttgtactcgccttcggtaggacgacccaggtgggaagttaccatcacttttgcgccttgtttcagggccagttcgatggtcggcagagaagcacggatacgcgcgtcgctggttactttcccgtcttttactggtacgttcagatccgcacggataaatacacgtttcccagcaagatccagatcggtcatcttaattacagacatggtgaatcctctcgttgattctaaaagttttgcagacgctgcttgcgtcttacctgaaagcaacagtagccatagctaacgtcgtgtcgagcattcggttagcaaagccccattcgttatcgcaccagaccaacgttttgatcaggtgtgcgccactgacccgggtttgggtgccatcgacaatggcactgtgcggatcgtggttaaaatctacagagaccaacggcaattccgtatagtcaactataccatgaaatgcaccttgtgctgctttttgcagcaacaggttgacttcattggcttttacaggtttcttcaccgtcacgcttaaatcgattgccgtcacatttatggttggcacacgtaccgcaatcgcttcaaagcgatcgttaaattgcggaaaaaatcgtgtgataccggcggccagtttagtatcgaccggaatgatgctctggctggctgcccgggtgcgacgcaggtcaggatggtatgcatcaataacctgttgatcgtgcatggcggagtgaattgtggtcacagtgccggactcaataccgtacgcatcatctaacaatttgatgacgggaattatgcaattcgtggtacaggaagcgttagaaacgatgcggtgttccgcacgaagttgatcctgattgacgccgtaaacaacggtcgcgtcgagatcgttactgccaggatgactaaagagcacttttttggccccggcggcaatatgcgcttcgccatgctcgcgggagccatatacgccggtgcagtcgaggactacatcaacgccaagttcacgccaggggaggctttgcagactacgttcatgcaatacgcggatggcgtcatcaccaacaaaaagttgatcgcgttcctgtcgtacttcccatgcaaaacggccatggctggtgtcatatttcaacaaatgcgccatgcccgcagcatccgccagttcgttgattgccaccacggtaatttccgcccggcgtccggattcatacaaagcacgaaccacattacgcccgatgcgaccgaagccatttatcgctacgcgtacggtcatagatctcctgcaaggttttccctgagcaaatttgccagacagagtaatccagcaaatcgtccggggaaaccttacctgtcgcaaactgcgactgattggttaattgtcgaacatttaatcgactgaaacgcttcagctaggataagcgaaacgtggaataaaaggaatgtttgtccagccgaagaagacatttatctgactcacatcacacttttatccccttttgtgggaagctttattccaggctggcgtaataataaccctacaataactggaataaattgtcagcttgtgaagtgataccggccttcttcagtcatctctactatcagattggcctgacggctattcatcagcacacgctcgacattggggccatcggtgcgggcataaaatgcttcggctacttgccgcgttaatcctcccgcaattttacgactaatcaagcgctcccgcagaatttgagcaggtgcatgaataaaaatagaaaaatcgcagaaagatgccaactccagccacttttcatcatccagtaacaaccagtttccttcgacgatgacgagtggtgcggtaacgtgcaacgcatcttcaacaggatcatgcttttgtcgatcgtactgcggccacgtacaatccccttccacgacctggcgcagattttccgtcagtttcgcaacgtcaaatgtctctggtgcgcctttgaaggggcgcaattgatgcgcatccagccagctattgtaatggtgaaaaccatccatcgggagcgtctgaatagcgggcagttccgggtcttgttgcgcgagatattcccagaaggtggttagggtacttttacccgtccccggcggagcgcaaagaaaaaccaccgtacgccgctgcggatttaccgtctgtaaggccgccaacatgtgcagcaacggtttatgtacattttcaatctcttcgttctggtactgtgcctgtatcttcagcccattcaccgttaattcaattttcacggcgttaattcctttaaggtggtcgttactgccagcgtcagcgccgttttgaccattccgctaaaacgcgcctcactccagacggagaaatcagcgaacttcatcgcttttaacgcgtcatagagcatcgcattgcgggttatgctattgacgttgctgataaaatcccaggtcatgtcatcggcaaatccgggcgtttcatcctgttcgttcaggtaatgccagaactgggaaaaatgcgtgatatcggcgtacaaccatttatccattttcccaacgcataaatcaaacgcagtgcaacatcaatatcgtcaagcgggccgctttgggcgagtaacggcttcactgcatattccacgatctcttcatcgttatcgacaaacaggctcggcagaaactggcgtatcccctggagcaaaatggtatgcgcagttttcataaaactaaataaattgtcctgtgcatccagttgctcaagcacatcatcttctgtcagcgtcgccattggtcttccgatagatcaccatcaatgcagggagtctattatattacacgtttggtccgcgccgccgatcagtaatgtctgcgtccgcaccccattcgccgtctgttggataccgttcaccagctcaccgcccgtcacgcccgtagcgctaaagaggatatcgttccccctcaccagttcatcgaggctgtacacacggttaacgtcaacgcccattgccttgcaacgcttgcgctcctgctctgcaatctgccgattttccgtgtaatcccctttagcctggcaaaagtcaatcagctcggcctgcatatccccgcctaatgctttaacggcacaggcagaaatcacgccttctggcgcaccgccgatggtgtacatcacatcgtaaggattatcctgccagcaggtcagcacgctggcggcgacatcgccatccggcagggcaaaaaccttcacgcccagctgtgttgcttcctcaatcgcggcactcaggcgcggtttatccagcgtaaccatgcgcagcttatccagcggtttgcctaacgctttcgccacgttgcgcaggttgtccgtcagaggcaaagacagatcaatcgcgcccgccgccagccgattaacaaccagctttttcatatacatatcgggcgcatgtaacaggctatctcgaggggcgaaagccatgaccgccagcgcattgctctgccccatcgccaccatccgcgtgccttcaatgggatcaaccgcgatatcgacttctggcccatcgcctttgcccacctcttcgccaatccacagcatcggcgcatggtcaatttctccttcgccgataaccactcgtccacgaaaagcgacgtcgtttaatgcctggcgcatcgcggtgaccgccaggccatcaattttatttttgtcgccacatccggtttgcggccaggcagccaacgctgcctgttccgtaacgcgaaataatggccacgccagggacatcattgcgcggcctccccgatatcaacgccaaattgtgccagcagatatttctcggcctgttcattccagatgccgtgcgtttcctcaaccagccgcgccaactctttaaacagcggatcggttttgcctttttcggcaaaatcggcaatggcagtgagcggcatggtcacgccgttataaatgagttttttaccgccagggatatccggcagattgagcacggtttctggcaccgcatccaggccaccgatatgggtcaccataaagctcggctgtaactgcccagtggcgctaagggcaatcgcctctttcatgtcgtccgtactaccgccagatgtaccgacgacgtgcgtgctgttgtaatggacgttgtagaaattaaacggcactttgaagtttttatccgtcggcccggcaaagaagttcagacagccatcttccgccagtaattcatcagccatctcaacgacagcaggcaccgccgcataaacaaaaatgtcatcgaacccggcatctcctgtcagcgcccgcagcatctggacaggatcgctcatccctttggtattcacatacaccagctcaatgcctttactggccgccagttccaccggcagcagcttctgtacctgcgccagacgtttgtcgtcgatatcgaccaccaccacccggctcggttgtatgccgccgttaatggcgtaatcgatagcgccaatgcccatcggacctgcacacgccagcagtgcaatattgccgccaggtttgacgcccatgcgatgctcataaacatattgcgtggtgtgataattggcatgataagcaccaataatgcagcacataggctctgccaggctcgccgcagcaaaataagagccgtgatacggtaatacgcagcccaaattaatggcgatttcgggaataatcatataagtggcattgccgccaaaatattcgtagctgtagcccgcactatatccgcttggtaaccccatcgccggttgcaatacaaaacgctggccttttttatatttgccagtgagatttttacccacttcgacaataaccccggcacattcatgcccggtaatgaccggatgattttctaaatcgtcgggtacgcgtttatgttcactaccgagtaacgccgctttccaggtgcttaaacagacgctgtcagaaattacactcaccagtaattcattatcggtaatttctggcagttcaaatacgcgcagacggacatcccgcttgccataaatagcagcaactttggttttcatttttacctctgtaatcagtgtttatgttcggcggttaattgattaaataaagtgtcgagttttggatcgccaatatagttattaatcaatatcagtggtttatccgtcacacgtttcacgcgcccttccagactggcatgagtaacgacgatatccgcatccgcaggcacgttttctatggcgtaatgttttacttcaattgccagccccgctttttccaggcgtttacggaaggtggtcgcgcccatcgcactggagcccatccccgcatcgcaaacaaaggcgatacgcttaaccctgcttaagctgaatgcaccctcttgtttcatcgccttaaccgcattggcactctgagcaaactcatcttcgctctccgtttccaccgttttttccatcttcagtatcaggctagtaatagcaaaggacaccagggtacctaccgtaacaccggcaattgtcgccaggaagctgcctttcggcgtcagtgccaggtaagcaaagatagaccccggacttgggccagccaccagaccaccgtccagtaagttaaacatccaggtgccagacataccgcccgcaatcatggcaataatggtcagcggcttcatcagcacatacgggaaatacagttcgtggatcccaccgaggaagtgaataatcatcgccccgggcgcagaacgtttactcatccctttaccaaacaaggtaaacgccagcagcagccccaggcccggacctgggttagaggccaccataaagaagatggatttaccgttaacgctagcctgttgcattcccagcggataatagacgccctgatcgatcgcattattgaggaaaagcactttcgccggttcattgatgacactcaacaatggcagataacccgcatgtaccagcgcctcaatacactctttgacgaaagtattggcaattaacaccgccgggccgataacttcaaaacccagcagacaaaggagcatccccgcgatacctaaactgaagttattgataaccatctcaaaaccggcaggtatgcgtttttccagtgccttatcgacatattttatgaccaacccaccgagcggccccatgatcatactgccaaggaacatcgggatctctgcgccaacgatcacaccaatagtacctattccgcccatgaccgccccgcgtttaccgccgaccagatgaccacctgtagaaccaatcatcacgggcaataaataggtaatcatcgggccgacaattttggcgaaatgttcgttaggcagccaaccggtgggaataaataacgcagtaataaaaccccaggcaataaaagcaccaatattggggatgaccattgcagtcaaaaagcccccaaaagcctggacctttgcacgagcagacttgttttccataatattatcctgtagaggagagagtaattatccgcggctgataatgtccgctaattgtttttcactacttgctgttaagagttgttcgagtatttcttcttcgcacagtaattcacttaacgcctgaatagcgccaatgtggctatcggcatcggcagcagagagtccgatgagtaatttaattggttcgtcattccccggaaaataaacaccttgttcaagtaatgtcaaagacatcccggttttaagcgccccacattccggtcgcgcatgaggcattgccacgcctggtgcgagaatataataagggccattgttaatggtggaatctttaattgcctgaatgtaattctcgctgatatagtttttatccagcaaacttaccatgctgaaatcgatagcttcctgccaatcttttgcactatgtataacactgatactactttctggaaaataatcactaagccgcataaattatccttattttatttttagggtaccgtccggcggtaaaaataaaatactcgtgcggtttaatgaaagcaattgagcagggaaaccggtgttttgaaaacagtgaattattaatttcttatataacattgagttatagatataacaacaaatgtcaatacgcatatcgtgatgcatattacataattgatatttattgcatataaatatttgtgatctacaacacgccttatctattgcttgtccgcaaacggacatatcaaggtaataaaaaaggtcgccgaagcgacctttttacccgaaatgctaattacagcagttcttttgctttcgcaacaacgttatcaacagtgaagccgaactcttcaaacagcagctctgccggagcagattcaccgaaggtggtcataccgacgatagcaccgttcaggccaacatacttgtaccagtagtcagcaatacccgcttctacagcaacgcgtgcagtaaccgctttcggcagtacggattcacggtaagcagcatcctgcttgtcaaatgcgtcggtagacggcatggacaccacgcgcgctttcacgccttcggcagtcagtttttcgtaggcagcaacagccagttcaacttcactaccggtagcgatgaaaatcagttccggctgaccggcgcagtctttcagcacataaccaccgcgcgcgatgtttgccagttgctcttcagttcgttcctgctgcgccaggttctgacgggagaggatcagtgcggtcgggccgtcctgacgctcaacaccgtatttccacgcgaccgcggattcaacctggtcacacggacgccatgtagacatgttcggggttacgcgcagagaagcgacctgctcaaccggctggtgagtcgggccgtcttcgcccagaccgatggagtcgtgggtgtaaaccatcacctgacgctgtctcatcagcgcagccatacgtacggcgttacgtgcgtattccacgaacatcaggaaggtggaggtgtacggcaggaagccaccgtgcagggagataccgttagcaatcgcggtcataccgaactcgcgaacaccgtagtggatgtagttacccgcagcatcttcgttgattgctttagaaccagaccacagggtcaggttagacggcgccaggtcagcagaaccgccgaggaattccggcaacagcggaccgaacgcttcgatagcattctgagacgctttacggctggcgattttcgccggattagcctgcagtttagcgatgaactctttcgctttagcgtcgaagtcagacggcatttcgcctttcatacggcgggtaaattcagcggcttcctgcggataagctttcgcgtaagcagcgaatttctcgttccatgcggattctttcgcctggcctgcttctttcgcatcccactgagcatagatttcagacgggatttcgaacggcgcatatttccagcccagttgttcgcgggtcagggcaatttcagcgtcgcccagcggcgcaccgtgggagtcgtgggtaccggctttgttcggggaaccgaaaccgatgatggttttgcacatcagcagggaaggtttgtcagtcactgcgcgcgcttcttctactgcgcgtttgatagatgccgcgtcatgaccgtcgatgtcgcgaataacgtgccagccgtaagcttcgaaacgcattgcggtgtcgtcggtgaaccagccttcaacgtgaccatcgatagaaataccgttgtcatcgtagaatgcaatcagtttacccagcttcagcgtacccgccagagagcaaacttcgtgggagatgccttccatcatgcagccgtcgcccatgaaggcgtaggtgtagtggtcgacaatgtcgtggcccggacggttaaactgcgccgccagcgttttttctgcaatcgccataccgactgcgttggcaataccctgacccagcggaccggtggtggtttccacaccagcggtgtaacccacttccgggtgacccggagttttagagtgcagctgacggaagtttttcagttcttccatcggcagatcgtaaccggtgaggtgcagcaggctgtagatcagcatggagccgtggccgttggacagcacgaagcggtcacggtcagcccaggacggattctgcgggttgtgtttcaggaaatcacgccacaggacttcggcaatgtcagccatacccataggggcacccgggtgaccggatttggctttctgtactgcgtccatgctcagcgcacgaatagcattggcaagctctttacgactggacattttgactccagatcggatgatgaagggcacgcccttaacgacttgacgacagcgcgttttgggctacgccggaaaatttgccaacaatttaccacaagccgcgcgtcatgtacatggaacatccttttgccgcttcagaaatctctggatcatgctcgcatgttgcgcaatctactcgcccgtccgctgcgcttttccttatactgagactgagcgtcgattcacctgcaaacggcgcatttttagaataatcctgaccttgtgcggaagagaaaacatgaaaattcgcgccttattggtagcaatgagcgtggcaacggtactgactggttgccagaatatggactccaacggactgctcagtagtggagcggaagcttttcaggcttacagtttgagtgatgcgcaggtgaaaaccctgagcgatcaggcatgtcaggagatggacagcaaggcgacgattgcgccagccaatagcgaatacgctaaacgtctgacaactattgccaatgcgctaggcaacaatatcaacggtcagccggtaaattacaaagtgtatatggcgaaggatgtgaacgcctttgcaatggctaacggctgtatccgcgtctatagcgggctgatggatatgatgacggataacgaagtcgaagcggtgatcggtcacgaaatggggcacgtggcgttaggccatgtgaaaaaaggaatgcaggtggcacttggtacaaatgccgtgcgagtagctgcggcctctgcgggcgggattgtcggaagtttatctcaaagtcaacttggtaatctgggcgagaaattagtcaatagccaattctcccagcgccaggaagcagaagccgatgattattcttacgatcttctgcgccaacgcggcatcagcccggcaggtcttgccaccagctttgaaaaactggcaaaactggaagaaggtcgccaaagcagtatgtttgacgaccatcctgcatccgccgaacgcgcccagcatattcgcgatcgcatgagcgcggatgggattaagtaaagcctggtggtgtcgaacgtaggtcagataaggcgttcacgccgcatctgacatgaatggcacatttgttaccttgtgcgcattgccggatgcgatgctggcgcatcttatccggcctacgggtgccgaacgtaggtcggataaggcgttcacgccgcatccgacattaatggcacgttttacccgtgcgcatcgcatctggtgcttactcgccctttttcgccgcctgaatatacagcatttccagcgccagcgttgccgctgccagagcagtgatttcgctctgatcgtatgccggagccacttccactacgtccatcccaacaatgttgagatctttcaggccgcgtaccagtttaatagcgcgatcggaggtcaggccgccaatcactggcgtaccggtgcctggtgcaaaagcaggatccaggcagtcgatatcaaaagtcaggtaaaccggcatatcacccacaatctgtttcacttgggcgataacgtcatccacgctgcgatcgttcacctggcaggcgtccagcacggtaaagccgttgtctttatcaaactcggtacgaataccaatctgcacggaatgattcgggtcgatcagaccttctttcggcgcggtatagaacatagtgccgtggtcaaattcacaaccgttcgcataggtatcggtgtgggcgtcaaagtgtaccagcgccattttgccgaaatgcttcgcatgagcacgcagcagcggcagcgtaacaaagtggtcaccaccgaaagagagcatacgcttaccggcagccagcagcttctcggcgtgcgcctgcagcttttcgctcatctcacgggcatcgccaaaggcatataccagatcgccgcagtccacgacgttcagacgctcacgcatgtcgaaattccacgggaagcggttgtgttcccaggccagattcgtgctaacctgacggatcgctgccggaccgtggcgaccacccgcacgaccagaagtggccatatcgaacggcacgccagtaatcacccagtctgcatcgctgtcatacggctggaagttcatcggcaggcgtaaaaaaccaaaggcattggaaaccagactgttatcgtattgatgacctaaggtgctcatggatggactcctattacaaagtcgatataaaaaaacccttccgcgtcgttaggcccgacgaggaagggttggatttgtcacaataaattgtggcggattatcaccgctaaattaagcggattcaagtaacacaggacttactcatcttcaagataagtataaccgtacaaacctgcctcgaactcttcaaggaactgttgttgcagttcagcatcaagatcggttttcttcacttgatcgcggaactgggttaacagcgttttcggatcgagctgtacatattgcagcatgtccgccacggtatcgccttcgtcagacagttctacttctacgctaccgtcagggaagacgaacacgtcaaccgcttcggtatcaccgaacaggttgtgcatgttgccgaggatctcctgatatgcgccgaccataaagaaaccgagcatcggcggattctctggatcgtactccggcattggcattgtcgtggcaataccgtcaccatcaatatagtggtcgatagcaccgtcagagtcacaggtaatatccagcagcacagcgcgacgttccggcacttgatccagcccttccagcggcagaaccgggaacaactggtcgatcccccatgcgtccggcatgctctggaacaggctgaagttgacgtacattttgtccgccatacgttcctgcagctcgtcgataatcggacgatgagcacggttttgcggatccagctgcttttgcacttcatggcacatgctcaaataaagctgctcagcccatgcacgttcttgcaggctaaagatgccggaagagtagccgatatgaatgtcgtgcagatccatctgactgtcgtgtaaccattcacgcagagaacggcgagttcccggttcgtgcatctcctgccaggtttcccacatgctttgcagcgcgcgcggcgcatcttctgcaggcgcggtcggcaccgtgtattcgttacgttccacgccgatgatattagacaccagcacggtgtgatgcgcagtcaccgcacgaccgctttcggtgattaccgtcggatgcggcagaccgttttcttcacacgcatcgccaatcgcccagataatgttgttggcgtattcattgaggccgtagttcacgctacagtcggactggctacgagtaccttcataatccacgcccagaccgccgccgacgtcgaagcactgaatattgacgcccagcttgtgcagttccacatagaaacgcgcggattcacgaacgcctgtcgcgatatcgcgaatattcgccatctggctaccgaggtggaagtgcagtagttgcaggctgtcgagacgcccggcttcacgcagggtttcaaccagttgcagtacctgagtcgcagccaggccgaacttgcttttttccccgccggaggactgccatttaccgctaccctggctagccagacgtgcacgcacgcccagacgaggaacgacattcagacgttctgcttcatccagcacaatggcgatttcactcatcttctcaatgaccagatagaccttgtgccccatcttctcgccaattaatgccaggcggatatattcgcggtctttataaccgttgcagacgatgacgctacgggtcatgccagcatgtgccagtactgccatcaactcggctttggaaccggcttccagacccagcggttcgccgctatgaatcagggactcaatcacgcggcggtgctggttaactttgatcggataaacaaggaagtaatcgccgttatagccgtaggattccctcgcacgtttgaacgcggcgttaatggaacgcaaacggtgctgcaggatctgtgggaaacagaacagtgcaggcagacgctggccctgtgcttcacgagttttcactaactgcgcgagatcgacgcgagcttccgggacgtccgggtccgggcacacgctaatgtggcccagctcgttaacgtcatagtagttattgccccaccaggcaatattgtaagtacgcagcatcttgctggcttcctgggagctcattgcaacctcctgcatggagcgtagtacaccgtgttcgcccgcactgctaggcaaacccatagacatgtcgtcagacatagcgaacctcaaattattttattaagtgtaaaacagttaacgactatcgcagcctggaactggcttaacaacccataagcacatggattttccagcagactatgctgacgctccaactgcgcaaccggtttctttttcataacattattaagcacataaccgaacgtaagtgtgaaagttcggcgaaaccacgagaaaactcttgtttttacaagagcgcccttgttcagtcctcagtaactgtaaccagctcttgaatcctgagaagcgccgagatgggtataacaagcgcaggtatgcaaagcagagatgcagagtgcggggaacgaatcttcaccagaacggtgagacaggttaagcagcagacaacggttcattatttcgtaagtcctccacggccgcctgttaagacgaacccacaagccaaaactctgattagtacccggctggaagtggcaacacgaaagaaacgtcgtgtgctttttatttaagccgcgcgccgcgttttataccccacaatggcagaaaattgcaaaagataaatacgcagaatgccggcattgtcaggaaaaatttccagccacgtttttaacagaatgagacagctttcaaaaaaaagtggaaatagggtgaagaattgacctaaaatagccatccagatgttaatccatccataccgattaacactcagactgccagtgtttttaacctgcagagtcgtggtaggatccgctaccacagaaaatccacacaacagtttgagctaaccaaattctctttaggtgatattaaatatggcaaaacacctttttacgtccgagtccgtctctgaagggcatcctgacaaaattgctgaccaaatttctgatgccgttttagacgcgatcctcgaacaggatccgaaagcacgcgttgcttgcgaaacctacgtaaaaaccggcatggttttagttggcggcgaaatcaccaccagcgcctgggtagacatcgaagagatcacccgtaacaccgttcgcgaaattggctatgtgcattccgacatgggctttgacgctaactcctgtgcggttctgagcgctatcggcaaacagtctcctgacatcaaccagggcgttgaccgtgccgatccgctggaacagggcgcgggtgaccagggtctgatgtttggctacgcaactaatgaaaccgacgtgctgatgccagcacctatcacctatgcacaccgtctggtacagcgtcaggctgaagtgcgtaaaaacggcactctgccgtggctgcgcccggacgcgaaaagccaggtgacttttcagtatgacgacggcaaaatcgttggtatcgatgctgtcgtgctttccactcagcactctgaagagatcgaccagaaaagcctgcaagaagcggtaatggaagagatcatcaagccaattctgcccgctgaatggctgacttctgccaccaaattcttcatcaacccgaccggtcgtttcgttatcggtggcccaatgggtgactgcggtctgactggtcgtaaaattatcgttgatacctacggcggcatggcgcgtcacggtggcggtgcattctctggtaaagatccaagtaaagtggaccgttccgcagcctacgcagcacgttatgtcgcgaaaaacatcgttgctgctggcctggccgatcgttgtgaaattcaggtttcctacgcaatcggcgtggctgaaccgacctccatcatggtagaaactttcggtactgagaaagtgccttctgaacaactgaccctgctggtacgtgagttcttcgacctgcgcccatacggtctgattcagatgctggatctgctgcacccgatctacaaagaaaccgcagcatacggtcactttggtcgtgaacatttcccgtgggaaaaaaccgacaaagcgcagctgctgcgcgatgctgccggtctgaagtaatctttcttcacctgcgttcaaaggccagcctcgcgctggcctttttcttttggataggcgttcacgccgcatccggcaaaaaaaccgcccgcacaataacatcattcttcctgatcacgtttcaccgcagattatcatcacaactgaaaccgattacaccaaccacaacagacaaagatttgtaatattttcatattattattcggttttcacagttgttacatttcttttcagtaaagtcttaattgcagataacagcgtttaatctatgatgatataactcaattattttcatgcacttaaatcataactaagataaatgttagtgtaagcgattacactgatgtgatttgcttcacatctttttacgtcgtactcacctatcttaattcacaataaaaaataaccatattggagggcatcatgcctgacgctaaaaaacaggggcggagtaacaaggcaatgacgtttttcgtctgcttccttgccgctctggcgggattactctttggcctggatatcggtgtaattgctggcgcactgccgtttattgcagatgaattccagattactagccacacgcaagaatgggtcgtaagctccatgatgttcggtgcggcagtcggtgcggtgggcagcggctggctctcctttaaactcgggcgcaaaaagagcctgatgatcggcgcaattttgtttgttgccggtagcctgttctctgcggctgcgccaaacgttgaagtactgattctttcccgcgttctactggggctggcggtgggtgtggcctcttataccgcaccgctgtacctctctgaaattgcgccggaaaaaattcgtggcagtatgatcagcatgtatcagttgatgatcactatcgggatcctcggtgcttatctttctgataccgccttcagctacaccggtgcatggcgctggatgctgggtgtgattatcatcccggcaattttgctgctgattggtgtcttcttcctgccagacagcccacgttggtttgccgccaaacgccgttttgttgatgccgaacgcgtgctgctacgcctgcgtgacaccagcgcggaagcgaaacgcgaactggatgaaatccgtgaaagtttgcaggttaaacagagtggctgggcgctgtttaaagagaacagcaacttccgccgcgcggtgttccttggcgtactgttgcaggtaatgcagcaattcaccgggatgaacgtcatcatgtattacgcgccgaaaatcttcgaactggcgggttataccaacactaccgagcaaatgtgggggaccgtgattgtcggcctgaccaacgtacttgccacctttatcgcaatcggccttgttgaccgctggggacgtaaaccaacgctaacgctgggcttcctggtgatggctgctggcatgggcgtactcggtacaatgatgcatatcggtattcactctccgagcgcgcagtatttcgccatcgccatgctgctgatgtttattgtcggttttgccatgagtgccggtccgctgatttgggtactgtgctccgaaattcagccgctgaaaggccgcgattttggcatcacctgctccactgccaccaactggattgccaacatgatcgttggcgcaacgttcctgaccatgctcaacacgctgggtaacgccaacaccttctgggtgtatgcggctctgaacgtactgtttatcctgctgacattgtggctggtaccggaaaccaaacacgttagcctggaacatattgaacgtaatctgatgaaaggtcgtaaactgcgcgaaataggcgctcacgattaatctccccaagcttcctcccatcgcggaggaagccacctcttgcagtcatcttttcttcgctctatcctctgccgctatgaaaacatcccgtctccctatcgccatccaacaggccgttatgcgtcgcctgcgggaaaaactcgcccaggccaacctgaagctagggcgtaactacccggagccaaaactctcttacacccagcgcggaacctccgccggaacggcctggctggaaagctatgaaattcgcctcaatcccgttttgctgttggaaaacagtgaagcttttattgaagaagtggtaccgcacgaactggcacatttgctggtatggaaacatttcggccgcgtagcgccacatggcaaagagtggaagtggatgatggaaaacgtgctgggtgttcccgcccgtcgtacgcatcagttcgaactgcaatccgtgcgtcgcaacaccttcccctaccgctgcaagtgccaggagcatcagcttaccgtacgccgccataatcgcgtagttcgtggcgaggccgtctatcgctgtgttcactgcggtgaacagctggttgcgaaataaccatctgaactatcaggaactttcctgatttggctgattgcataccaaaacagctttcgctacgttgctggctcgttttaacacggagaagtgcctacactagcgggattctttttgttaacccctaccccacgcgtacaaccgcgtggggagacgacgcggatttttaactatgcgtatcccccgcatttatcatcctgaaccactgaccagccattctcacatcgcgctttgcgaagatgccgccaaccatatcgggcgcgtactgcgcatggggccggggcaggcgttgcaattgtttgacggtagcaaccaggtctttgacgccgaaattaccagcgccggcaaaaaaagcgtggaagtgaaggtgctggaaggccagatcgacgatcgcgaatctccgctgcatattcacctcggtcaggtgatgagccgtggtgaaaaaatggaatttactatccagaaaagcatcgaactcggtgtaagcctcattacgccacttttttctgagcgctgcggcgttaaactggatagtgaacgtctgaacaagaagcttcagcagtggcagaagattgcaattgctgcctgtgagcagtgtggtcgtaaccgggtgccggaaatccgtccagcgatggatctggaagcctggtgtgcagagcaggatgaaggactgaaactgaatcttcacccgcgcgccagtaacagcatcaatacgttgccgttaccggttgaacgcgtccgcctgctgattggcccggaaggcggtttaagcgcagatgaaattgccatgactgcccgctatcaatttactgatatcctgttgggacctcgcgttttgcgtacagagacaactgcgctcaccgccattaccgcgctacaagtacgatttggcgatttgggctaacggagaagaataatgatcaagctcggcatcgtgatggaccccatcgcaaacatcaacatcaagaaagattccagttttgctatgttgctggaagcacagcgtcgtggttacgaacttcactatatggagatgggcgatctgtatctgatcaatggtgaagcccgcgcccatacccgcacgctgaacgtgaagcagaactacgaagagtggtttagcttcgtcggtgaacaggatctgccgctggccgatctcgatgtgatcctgatgcgtaaagacccgccgtttgataccgagtttatctacgcgacctatattctggaacgtgccgaagagaaagggacgctgatcgttaacaagccgcagagcctgcgcgactgtaacgagaaactgtttaccgcctggttctctgacttaacgccagaaacgctggttacgcgcaataaagcgcagctaaaagcgttctgggagaaacacagcgacatcattcttaagccgctggacggtatgggcggcgcgagcattttccgcgtgaaagaaggcgatccaaacctcggcgtgattgccgaaaccctgactgagcatggcactcgctactgcatggcgcaaaattacctgccagccattaaagatggcgacaaacgcgtgctggtggtggatggcgagccggtaccgtactgcctggcgcgtattccgcaggggggcgaaacccgtggcaatctggctgccggtggtcgcggtgaacctcgtccgctgacggaaagtgactggaaaatcgcccgtcagatcgggccgacgctgaaagaaaaagggctgatttttgttggtctggatatcatcggcgaccgtctgactgaaattaacgtcaccagcccaacctgtattcgtgagattgaagcagagtttccggtgagcatcaccggaatgttaatggatgccatcgaagcacgtttacagcagcagtaacccaccttagcgagaaggatctcgttgagactctgagtgacagcgcccttctttccacgcatactgggcgctgttgcttttttgaaccaggaaacagaacctctgacaatgaatttacagcatcactttcttattgccatgcctgctctccaggatccgattttccgtcgttccgtggtctacatttgcgaacataataccaatggtgcaatggggatcatcgtcaacaagccgctggaaaatctcaaaattgaagggattctggaaaagctgaagatcacgccggagccgcgtgatgaaagtatccgtctggataaaccggttatgctcggcggtccgctggctgaagatcgcgggtttattttgcatactccgccctccaattttgcttccagcattcgcattagtgacaacacggtaatgaccacttcccgcgatgtgctggaaacgctcggcaccgataaacaaccgtctgacgtattggtggctctgggttatgcctcctgggagaaaggtcaactggaacaagaaattctcgataacgcgtggctaacggccccggcagatctgaatattctgttcaaaacgccgattgccgaccgctggcgcgaggcggcaaaactgattggtgtggatattctcaccatgcctggtgtggcaggacacgcctgatgagtggaaccttactcgccttcgacttcggcaccaaaagcattggcgtagcggtcggccaacgcattaccggcaccgctcgccctttgcctgcaattaaagcacaggacggtacgccggactggaacattatcgagcgtttactgaaagagtggcagccggacgaaatcatcgtcggtttgccgctgaatatggacggcaccgagcaaccattgactgccagagcgcgtaaatttgccaaccgtattcatggccgtttcggtgttgaagtaaagctccatgacgagcgtcttagcactgtggaagcccgttccggtctgtttgaacagggcggctatcgggcgctcaacaaaggcaaagttgactctgcctctgcggttattattctcgaaagctatttcgagcagggatattaaggcgatttaaacgcctggcggagtgtaaataatatcatcgcgtcttattgccggatgcggcgtgaacaccttatccagcacacatctggcagcggctataggtctgataagacgcgttagcgtcgcatcagacatttattgcctttgtaggcccgataagcttgcgcatcgggcatggcaacgtcacaaacgcccttcccccacccggtgctgataactctgctgaaacgttatcatccccacctgctgcccggtttgaataacatgcggtaactggtgggttttcccttcgcgaatcaaattccccaccgcgggtgtgttaatcagcaattcaaatagcgccacgcgtccttcctgtttatccacttccagcttttgactcagcactgcccgtaaactacctgccagttgattacgcacggggtctttttcctgcgccggaaaactatccaccagtcgctcaactgcctgcgcggcaccacgcgtatgtaatgttgccagcaccaaatgcccggtttctgccgccgtcagtgccagacggattgtctcgctgtcacgcagctctccgagcaaaatcacatcaggatcttcccgcaatgcggcccgcaatccgcttgcgaacgtcatacagtgcaaaccaatttcccgctgctggatcaaacatcgctggctggcatagagatattcaacaggatcttccagcgtcagaatatgcgcatcggcatgttgattgagatagccaaccatcgccgccagcgtggtagatttgccactccccgtcgcccccgtcaccagaatcaggccattctcgctcttgagtaattccggcaataccgttggtgcgccaagctgttcgagctgcgggcagtggctaggtaacagccgtaacgccaggctaatgccatgccgttgcgcgaatgcgctgccacgcaatcgctggttttccgccaggctcacggcaaaatccagctgaccattctccagcaatattgcccgctgatcgtcatccagccactcccgcagtagctcttcgacgtccggcgtatcaaacggcgcagcttccattctgccgcgaatgcgccatcgtgcgggccaggcgctgcacaggtgtagatcgctgacgttatgctttacactaagggccacaatttcttccatattcatactaagatcctcggaaaatgaacgatattgcgcataacctggcacaggtccgggacaaaatcagtgcggctgcaacgcgttgcggccgttctccagaagaaattacgctgcttgcagtcagtaaaacaaaacctgcgagcgccatcgcagaagccattgatgccgggcagcgtcaatttggtgaaaactacgttcaggaaggggtagataaaattcgccactttcaggaactgggcgtaacaggattagaatggcattttattggcccgttgcagtctaataaaagccgcctggtggcagagcatttcgactggtgtcataccatcgaccgtttgcgcatcgctacccgtctcaacgaccagcgcccggcagaacttccccctcttaacgttctgattcaaattaacattagtgatgaaaacagtaagtccgggattcaactggctgaactggacgagctggcagctgcggtcgctgaactaccgcgtttacgtctgcgcgggttgatggcaatccctgcgcctgagagtgaatatgtaaggcagtttgaagttgcacgccaaatggctgtagcatttgccggactgaaaacgcgctacccgcatatcgacacgctctctctgggaatgagcgacgatatggaagccgccattgcggcaggtagcacgatggttcgtatcggcactgcaatttttggtgcgcgtgattactctaaaaaataaggaattaaaggaacgccatgaatacgttgactttcctgcttagtacggtcattgagctgtataccatggtgctgttattacgcatctggatgcagtgggctcattgtgatttttacaaccccttcagtcagtttgtagtgaaggtaacgcagccaattatcgggccactgcgccgcgttattccggcaatggggccaattgacagcgccagcctgctggttgcctatattctcagttttatcaaagccatcgtgctgtttaaagtggtgaccttcctgccaatcatctggattgccggtttactgattctgctgaaaaccatcggcctgctgattttctgggtcctgctggtgatggcgattatgagctgggtaagccaggggcgtagcccgattgaatacgtgctgattcagctggccgatccgctgctgcgcccgattcgccgcctgctaccggcaatgggtgggattgatttcagcccgatgatcctcgttctgctgctgtatgtcatcaatatgggtgtcgcagaagtattacaggcaaccggaaatatgctgctgccagggctgtggatggcgttatgaatgccgtaacagttaatgatgacggtctggttttacggctctatattcagccgaaagccagccgtgattctattgtcggtttacatggcgacgaagttaaagtcgccattaccgcgccgccggttgacggccaggccaacagtcatctggtgaagtttctcggtaagcaattccgggttgccaaaagccaggtggtgattgaaaaaggcgaacttggccgccacaaacaaattaaaatcattaatccgcaacaaatcccgccagaaatcgcggcgttaattaattaagtatcctatgcaaaaagttgtcctcgcaaccggcaatgtcggtaaagtgcgtgagctggcgagcctgcttagcgacttcggtcttgatatcgtggcccaaacagacctcggcgttgattccgctgaagaaaccggcctgacctttatcgaaaacgcgattctgaaagcgcgccatgcggcaaaagtgaccgctttaccggcaattgccgacgactctggtctggcggtagatgtgcttggcggcgcgccgggcatttactccgcgcgttattccggtgaagacgcgaccgatcaaaagaatctgcaaaaactgctggaaacaatgaaagacgtaccggacgaccaacgtcaggcgcgtttccactgcgtgctggtatatctgcgtcacgcggaagatcccactccgctggtatgccacggtagctggccgggcgtgattactcgtgaaccagcgggcactggtggctttggttatgatccaatcttcttcgtaccttccgaagggaaaaccgccgccgaactgacccgcgaagaaaagagcgccatttcccaccgtggtcaggcgttgaaactgctgctggacgctttacgtaatggttaaattacctccgctgagtctctacattcacatcccgtggtgcgtgcagaaatgcccgtactgcgatttcaactctcacgcgttgaaaggagaagtgccgcacgacgattatgttcagcatctgcttaacgatctggacaacgatgtggcttacgctcagggccgtgaagtaaagacaatctttattggcggtggtacgccgagcctgctttccggcccggcgatgcaaacgctgctggacggcgtgcgtgcgcgtttgccgctggcagcggatgcagaaattactatggaagcgaaccctggcacggtagaagccgatcgctttgtcgattatcagcgtgctggtgtgaaccgcatctctattggtgtgcagagttttagcgaagaaaagctgaaacgacttgggcgtattcatggcccgcaagaagcgaaacgcgcggcgaagctggcgagcggtttagggttacgtagctttaaccttgatttgatgcatgggctgccggatcaaagtctggaagaggcgcttggcgatctacgccaggccattgaactgaatccgccgcatctttcctggtatcaactgaccatcgaacccaatacgctgtttggtagccgaccaccggtgctgccggacgatgacgcgttgtgggatatattcgaacaggggcatcagttattaaccgcagcgggttatcagcaatatgaaacttccgcttacgccaaacccggttatcagtgccagcacaatctcaactactggcgctttggtgactacatcggtattggctgcggcgcacacggcaaagtgaccttcccggatgggcgcattctgcgtaccaccaaaacgcgtcatccgcgtggttttatgcaaggaaggtatctggaaagccagcgtgatgtcgaagccacagataagccgtttgagttctttatgaatcgcttccgtctgctggaggccgcgccgcgcgtggagtttattgcgtataccgggctttgcgaagatgtgattcgcccacagttagacgaggcgattgcccagggttatctcaccgaatgtgcggattactggcagataacggaacatgggaagctgtttttaaatagcctgctggagctttttctggctgagtaaacttgtattgccggatgcggcgtgaacgccttatccagccgacatgtggcagcggttgtaggtctgataagacgcgcaagcgtcgcatcagacgttgattgccggatgcggggtcaacgccgcatcctgctacaaatcgtgcactatatcaaacttacttaatcaccccattgcgccgcagttgttcggtatcttttttccagcgttcattagcttggttgatatcgtcaattttcatcaaaatcgcgacttttttactgtttatttcactaactttcatcgttaacggatattgccctttttcgagcgttacccagtcatcctgcaatttacggctaagtttttgactttgcagaaaagtctgtcgccgttgttcgttgatatcgaaatctcgtttctgctgaatcggcacttcataacactcttcactctgtttatgacatgccgcaatcgccggttgataaacctctttgtcatatttaaccgcgaacgcctcgctatcgttctgtttattaaactcatcacgctgttggtgaatttttttaaaggcgtcttcgcgggtcatttgcttaccgtttgcatcttttccccaatatgcatccgctgctttctgcgccgccaccatttgcttatcaagcgctttcacttccttttccagcgcaggaatgctgttcttctgggtattcaacgcagattcaagctgactaaagcgataattgaaatcttcgctattcacgatcagatatttattattcgttttgatatcgtcgaccacccgcccacgatcgctggctgccgcctgaaaagagtaaaagttcacgctccagccagacgcgggcgttcctttactggttaacatcgcgctgaattttaccggtttatctttcgtccaggtctgttcgagcagttcgtaatctgccaactgaccgacccaggtatagagatcgtcactggaagagacatcgccttccgcactccaggtggcctgattacccttagcatcaagattttttaaggtgatagcatcaagcttgagaatgccgtgatactgctttttgaattgatcttttaagatattttcagttggcggttcgccatctgcccaggcattaccagtcatcaacataagcagtgccgtgccaacaatccattgctttttcacccgaaaaacctcacgcggaataatttattccggtgattatcattagggtaattaaaattggcaatggacgtgagtctgaagtgaaaaagccccggcacgataccggggcgaggcgattagtactgattgaagatctgctggatctgctgcggatctttggtttgcgtcagagccagttgcagcagaacgcgcgctttttgcgggttcagcgtgccagaggcgacgaagccgtatttcgcatcatccacttcggcatcctgagtggtagcgcccgtcggtacgcgggaagaacgcacgactgcagtaccggttttcgcggcggtcgccagcgtgtcgaacacagatttatacaggttgccgttacccacaccagcgctaacgatgccatcatagcccgcatctaccagtgctttagccggaagatcggatgcgttagcgtagttataaacaatgccgactttcggcagttcattcagcttagagacatcgaatggcgtgtcgctggtatgcttacgtgccggggtacgctggtagtcaatcttaccgttgtgaatgtaacccagaggaccgtagttaacagacttgaaggtcgctacgtcggtggtgttggttttggtgacgtcacggccatcaagcacggtgtcattcatcactaccagcacgccacggttggcggaggctttatcagctgcggtcactaccgcgttatacaggttgaatggaccgtctgcgctcatagacgtggacggacgcattgcgccgaccatcaccaccggtttgtcgcatttcaccgtcaggtcgaggaagtaagcagtttcttccatcgtgtcggtaccgtgggtaatgacgaagccgtcggtcttatcgcagtcggtgttaatttttttcgccagtgtcagccagacattatcgttcatgtcctgggagccgatattcactacctgctcgcctttaacgttcgcaatgtcttttagttgcggcaccgcattaaccagattttctacgccaactttacccactgtgtagttagatttggttgcggagtcaccaccaccggcaatggtcccgccggttgctaaaatggtgatattgggtaatgccaatgctgcaccactaaaacccataaccagtgcggcaagtgccgtctttttgaaaaactccatttcattcctccagttacgtgaacgctacgcattatcccttagctctgtatgggaaatttgacgttaaacaatttacaacgtgaatatattttggagatctacaaagttagaggcaggtaacaaaacgaagaattaaacggcataaaaaagtattatgccgtcttaaaatagaggattattttaaattcccgaccagggctttgcggctatcttccagagtcacaacgcggctacaaacatctttgccaaactgctggaaatctttttcctgctttttccactcggtttggatactggattgcagcccccccaggcttcccagcacattctgtaatgggttaccgccgctttttcagcaccgctttcgcgcccatttcattaatgctgtcctgtaaaattccacccattgcctgattcactaattgctggccttcggcgcgaacctgatcaatggctttatagtgaaacgtcaggccatcgctgcgcgtttcaataatgcggttcatctgctctttcagctgcgcatcaagtttggtcagacggctgcgcattttgctgctttcgcccatctcctgaacgataattttatccagagcaatacgggctttctcgacgcggcttttcgcgccttcatcaatccacggcagcgtgctgcgtagttcagcctgataatccttcgcctgctcgcgctgggcggcattcagggaatattgcttaccgttatacatcacgttgccgtctggcgtgatcaccagattgccgttttcgcccttcacctgcacggtttgcgggctgacaatcacatcgtcacgcggcgtgacgctgcactggtagtcggcgtgagcggtcattgccgtcacactaagtgctgccgccagcagcattttgcgcatcatagtcttccctcaagaaaaaatcaggccagcatttgctggccccagattgataacaaagtacgcgttttccatgccggatgcggcgtaaacaccttatcccgcctactcgatcgtgcatctttccaggcctgataagcgtagcgcatcaggcagttttgcatttgtcatcgcccgtatgctttcttagtcccaccaaacgtcgaaaagttcgctggtgcgtacctcatccagtttgcgctcttccagccacttacgcacaatcgcctgatgttcttcggtgcatttgccgatttcctgcatgcagatcagaccttcccaggccagataaccgctgccgtcaaaggccagtttgttcggttcgataacctcgttaataaaatcatcaacggttttatcaatctgttcttcgcttgtaccttccgggaatcgccatgccacgctaaatcctaattcctggaattcgtcgatgtgcatttttttacgcagacgacggctacggttctttgccattatttcaccctctcgaacattaagtcccatactccgtgaccaagacgatgaccacgttgttcaaatttcgtcaccggacgacttgccggacgcggtacgtaatcattgctctcactcaggtttttataaccgtcaatagaagacatcacttcaagcatatgttccgcataaggttcccagtcggtcgccatatggaatacgccccccagctgcagtttgctttttaccagttcggcaaacggcacctgaacgatacggcgtttattatggcgcgctttgtgccacgggtcagggaaaaagagctgcaccatgcgcaaactattgtcaggaatcattttatgcagcacttcaaccgcatcgtgacacatcacgcgcaggttgcttaaaccttcttcatgcgcagaagccaggcacgcaccaacgcccggactatgcacttcaatgccgaggaagtcctgctcagggcgatctttagccattgccaccaggctcgcccccatgccaaaaccaatctcaagcgtcaccggcgcttcacggccaaaaagcgcggggaaatccagcatatcttcgctgaactcaacgcccatcaccggccagtagttttccagcgcatgttcctggcctttggtcagtcgcccctggcggcgcacaaaactacggatacggcgcagtgggcggccgttttcatcaaattccggactaatgacgtcgtttttcataaaggtttagtcgcttgtgaaagtgttctgaaaacgggcattatccaaagttagttgccggatgcaagcatgataaggccgtggctgcggaaagttccggtttacaccctgccgtcgctgtgctgcaatcttgcccccaacaacagtgaattcggtgaccatgcaagcgagccaatttagtgcccaggttctggactggtacgataaatacgggcgaaaaactctgccctggcaaattgacaagacgccctacaaagtatggctcagtgaagtgatgttgcaacaaactcaggttgcgaccgttatcccctattttgaacgctttatggcgcgcttcccgacggtgaccgatctcgccaatgcgccgctcgacgaagttctccacttgtggaccgggcttggctattacgcccgcgcgcgcaatctgcataaagcggcacaacaagtggcgaccttacacggcggtaaattcccggaaacctttgaggaagttgcagcactgccgggcgtcgggcgttccaccgcaggcgcgattctcagcctttctctgggtaagcactttccgattctcgacggtaacgtcaaacgcgtgctggcgcgctgctatgctgtaagcggctggcctgggaaaaaagaggtcgagaataaattatggagtttgagcgagcaggtgacgcccgcggttggcgtggaacggtttaatcaggcgatgatggatttgggtgcgatgatttgtacgcgcagcaaaccgaaatgtagcctctgtccgctacaaaacggatgtattgccgccgccaacaatagctgggcgctttatccgggcaaaaaaccgaaacagacgctgccggagcgcaccggctactttttgctattacagcacgaagatgaagtattgctggcgcagcgtccgccgagcggattgtggggcggtttatactgtttcccgcagtttgccgacgaagaaagtttgcggcagtggctggcgcaacggcagattgctgccgataacctgacgcaactgaccgcgtttcggcataccttcagccatttccacttagatattgtgcctatgtggcttcccgtgagcagtttcaccggctgcatggatgaaggcaatgcgctctggtataacttagcgcaaccgccgagtgttggcctagcggctcccgtggagcgtttgttacagcagttacgcactggcgcgccggtttaacgcgtgagtcgataaagaggatgatttatgagcagaacgattttttgtactttcctgcaacgtgaagcagaaggtcaggattttcagctgtaccccggcgagctgggaaaacgcatctataacgagatctccaaagaagcctgggcgcagtggcagcacaagcaaaccatgctgattaatgaaaagaaactcaacatgatgaatgccgagcaccgcaagctgcttgagcaggagatggtcaacttcctgttcgagggtaaagaggtgcatatcgagggctatacgccggaagataaaaaataaaaacagtgccggagcacgcctccggcaacttgcataaaaacaaacacaacacgcacccggaatgatgaaaaaatatctcgcgctggctttgattgcgccgttgctcatctcctgtagcacgaccaaaaaaggcgatacctataacgaagcctgggtcaaagataccaacggttttgatattctgatggggcaatttgcccacaatattgagaacatctggggcttcaaagaggtggtgatcgctggtcctaaggactacgtgaaatacaccgatcaatatcagacccgcagccacatcaacttcgatgacggtacgattactatcgaaaccatcgccgggacagaacctgccgcgcatttgcgccgggcaattatcaaaacgttattgatgggtgacgatccgagtagcgtcgatctctattccgacgttgatgatattacgattagcaaagaacctttcctttacggtcaggtggtggacaacaccgggcagccgattcgctgggaaggtcgcgcaagcaacttcgcggattatctgctgaaaaaccgtctgaagagccgcagcaacgggctgcgtatcatctacagcgtcaccattaacatggtgccgaaccaccttgataaacgtgcgcacaaatatctcggcatggtccgccaggcgagtcggaaatatggcgttgatgagagcctgattctggcaattatgcagaccgaatcttcctttaacccgtatgcggtcagccgttccgatgcgctgggattaatgcaggtggtacaacatactgccgggaaagatgtgttccgcagccaggggaaatccggcacgccgagccgcagtttcttgtttgatcctgccagcaatattgataccggcaccgcgtatctggcgatgctgaacaatgtttatctcggcggaattgataacccaacaagccggcgttatgccgtcatcaccgcctataacggcggcgcaggcagcgtgctgcgagtctttagcaatgataagattcaggctgccaatattattaacaccatgacgccgggcgatgtttatcagacgctgacgacccgccatccctctgcggaatctcgccgttatctttataaagtgaataccgcgcaaaaatcctaccgccgccgataattccattaaccgcccctgacgatgctcaggggcaaaaatgttatccacatcacaatttcgttttgcaaattgggaatgtttgcaattatttgccacaggtaacaaaaaaccagtccgcgaagttgatagaatcccatcatctcgcacggtcaaatgtgctttttcaaacactcatccgcatcacgatgtgaggaaattaacatgaatcttaagctgcagctgaaaatcctctcttttctgcagttctgtctgtggggaagttggctgacgaccctcggctcctatatgtttgttaccctgaagtttgacggtgcttctattggcgcagtttatagcagtctgggtatcgcagcggtctttatgcctgcgctgctggggattgtggccgacaaatggttaagtgcgaaatgggtatatgccatttgccacaccattggcgctatcacgctgttcatggcggcacaggtcacgacaccggaagcgatgttccttgtgatattgattaacagctttgcttatatgccaacgcttgggttaatcaacaccatctcttactatcgcctgcaaaatgccgggatggatatcgttactgacttcccgccaatccgtatctggggcaccatcggctttatcatggcaatgtgggtggtgagcctgtctggcttcgaattaagccacatgcagctgtatattggcgcagcactttccgccattctggttctgtttaccctgactctgccgcatattccggttgctaaacagcaagcgaatcagagctggacaaccctgctgggcctcgatgcattcgcgctgtttaaaaacaagcgtatggcaatcttctttatcttcagtatgctgctgggcgcggaactgcagattaccaacatgttcggtaataccttcctgcacagcttcgacaaagatccgatgtttgccagcagctttattgtgcagcatgcgagtatcatcatgagcattagccagatctctgaaaccctgttcattctgaccatcccgttcttcttaagccgctacggtattaagaacgtaatgatgatcagtattgtggcgtggatcctgcgttttgcgctgtttgcttacggcgacccgactccgttcggtactgtactgctggtactgagcatgatcgtttacggttgcgcattcgacttcttcaacatctctggtagcgtgtttgtcgaaaaagaagttagcccggcaattcgcgccagtgcacaagggatgttcctgatgatgactaacggcttcggctgtatcctcggcggcatcgtgagcggtaaagttgttgagatgtacacccaaaacggcattaccgactggcagaccgtatggttgattttcgctggttactccgtggttctggccttcgcgttcatggcgatgttcaaatataaacacgttcgtgtcccgacaggcacacagacggttagccactaattacgcaaagaaaaacgggtcgccagaaggtgacccgttttttttattcttacttcaacacataaccgtacaaccgtttcacgccatccgcatcggtttcgctataaacaccttgcagctccgggctaaatcccggcaacaaattcaccccttcttccagtgcaaggaaataacgttgaaccgccccaccccagacttccccgggtaccacgcaaagcacgccaggtggataaggcaacgccccttctgccgcaattcgcccttcggcatcacgaatccgcaccaactccacgtcaccgcgaatataagcgctatgcgcatcctgggggttcatcaccacactcgggaaactctgctggcggaacatcgctttttgtaggtctttgacgtcgaaactgacatacagatcgtgcatctcctgacacaactggcgcagggtgtagtcgcgatagcgcaccggatacttgttataaacgctcggcaacacctcaaccagcgggctgtcatcctcaatatgctgttcaaattgcgccagcatcgccaccagttgtgccagcttctcgtggctttccgccggagttaataaaaacagaatggagttgagatcgcacttctccggcacaatgccgttctcacgcagatagtgcgccagaatcgtcgccggaacgccaaagtcgctatattcgccggtttcggcatcgatacctggtgtagtgagtaacagcttgcacggatcaacaaaatactgatccgcggcatatccttcaaagccgtgccacttcgcccccggctcaaaactgaaaaaacggcggtcgctggctaacacacttgtcggataatcctgccacaatttgccatcaacaacgggcgggataaacgggcggaacagcttacagcgcgcaagaatagccttgcgcgcttcaatccctatctcaacacactcagcccacagccgacgcccactctccccttcatgaattttggcgttaacatccagtgcagcaaacagcggatagaaagggctggtagaagcatggagcataaaggcgttattcaaccgcttatgcgggcaaaaacgcgcctgtccgcggatatggttatcttttttatggatctggctcgtctgactgaatcccgcctgctgtttgtgcacgctctgagtcacaaagatccccggatcgttttcgttaagttctaacagcagcgggctgctatccgccatcatcgggataaattgttcataaccgacccacgcggaatcaaacagaatgtaatcacacagatgcccaacggtatcgatcacctgacgggcgttatagacagtgccgtcataggttcccagctgaataatcgccaggcgatacgggcgcggcaggtcggctttttctggcgcaacgtcgcgaatttgctggcgcagatactcttcattaaaacagtgcgcatcaataccgccaatgaaaccaaacgggttgcgactagcttccagatagaccggcgtcgcccccgcctgaatcagcgcgccgtgatgattgctcttatggttgttacggtcgaagagcaccagatcgccacgcgttaacagcgcattcgtcaccactttattcgctgcgcttgtgccgttcagcacaaaataggttttatcggcatgaaagactttggctgcgaatttctgcgcatctttcgcgcttccttcatgaataagcagatcgcccaattttacgtcagcgttacacatatcggcgcgaaagacgttctcaccaaagaaatcgtaaaaatggcgtccggcaggatgctttttaaaaaacgcaccatgttgatgtccagggcaagcaaaggtgctgttgcccatctcaacgtactgcgtcagcgtgtcataaaacggtggcagcaaattctcttcatactgacaggctgcggattccagctccagccactgctgctcgttgccgttgattaccgccgtaacgcccgcaggtaattcaacagcatgttcggaatacaaaaacaccggtagatgaaaaccggtgcgcttaagcaacgcaagaatgccactgcgactatccgcagcggtaatgacgactgccgcgacgtccgtaaaatcagtatctcccaacgccaccacgcgacgatgagaagaaagtcgggataccagttcactactggcggcaatattcatacttttcataagcgcaaacccgtttcggggaagtaagaataccggacaaggtggaaaaccctgccccatgagatatgggtcaaactggtcaccagctccgaccgccagacatcagtaaaagcagaaacgctctgattttactgttgtcctgcagtgagcgtgcgttaacttcaccgcatgagcagtaacatagaaagggaaacgtttcgcgcgaaacggcgataagcgagagaatgtaaggagatggcgtgcatcgggcaaactccgtacagagaggagaaaattcgcgcaatcatggcacctttcgctaaagcgtgcaagccaggactttgcgaacaaacaagccatcgacggcaccaaacggtcataataagaaaatcaaacaatacagctaacaggaactcttgtggtcatcggcccttttatcaacgctagtgcagtcttactgggtggcgttctcggcgcactgctcagccaacgcttaccggaacgtatccgcgtctccatgacaagtatttttggtctggcaagcctggggattggtattttactggtggtgaaatgtgccaaccttccagcgatggttttagctacgctacttggcgctctaattggcgaaatttgtttgctggagaaaggtgtcaatacagcagtcgccaaagcacaaaatctgtttcgtcacagtcgtaagaagccagcgcatgaatcttttattcagaattatgtcgcgattattgtcctgttttgcgccagcggcaccgggatcttcggggcgatgaacgaagggatgaccggcgatccgagtattttaatcgccaagagttttcttgatttctttacggcgatgatcttcgcctgcagcctgggtattgcggtaagcgtgattagtatcccattactgatcatccagttaacgctggcgtgggctgccgcgctgattttaccgctgaccacaccgagcatgatggcagacttcagcgccgtaggcggtttattgctgctggcaaccggattacgcatctgtggcattaaaatgttcccggtggtcaacatgcttccagcactccttctggcaatgccgctttccgccgcctggaccgcctggtttgcctgacaatgcgtgcaatatcggcaaagtgatgatagattgtgcagtctgcagtaaattgaagaaatttgattgacgagacgaggcgaatcaggtttaatgcgccccgttgcccggatagctcagtcggtagagcaggggattgaaaatccccgtgtccttggttcgattccgagtccgggcaccactaattcttaagaacccgcccacaaggcgggtttttgcttttggatctgacaataaccttcacgaaaaaaattagcttataaagtctgggggaattactctcgccacgttaacgagagtaattttattgatattaatctcctgatactttacccccgtccaaactccagccgctgcacattcaccatcccaggcttctcagcagcactgacatcaatttgtgtcacccgcagcgcatagaacgccattttgaatttacgaacggacgcattatcagtgactttaacggcatgggcaaagtgaaatatcattttttaacgataaaaagagtgttatttcttgtgtatcagacaataagcattcattcaaaacctttagaaataatcaaaacacaggtattccactggttaatatattcacatatgaaatgaataaatattggaatatataaatattgaatattttgattaatccccgtactgattattcttcataatcagtacggggttgctacaacatgtattactttttcaccacaattaacggttcaatatcactctcttttttgatgaccagactttcatcaccgcgcaaacacgtcccaccgtagttgccgccaacggtgaaggtacatacctgaatgtatttaccgtccactttcggcaaacaccacagttgctgatagatgtttttctgctcggcaaatttaccgctggttttgtccagcacctcttcatgatggctgacgaggtcgatattgctgccacagcgaccggcgatcggtttcactgcgtaacctgttttcaccagttcatcattaacagtgaaatcggtatccagcaggtaacgatggtgcgggaacaggctccagaggatcggcagaatcgctttgttgccggggatcaccgtccacagcggctcaaagaccagcacttccgggcgcagcaatacgtcgataagacgcacttcgttttgcggatgaccggtacggattggcaccgcagcaaactcacggtcgctaacttcacgaatctgatcaaacgcggtttcccacgcccaggttttccacacgcagttaaccagtcgcccttccccatcaatcagttgcccggcagcatcccagcccagttcatccaatccacgcaagatacgcgtttcaaagcccgcctggtgcagcgcctgctccataaactgcgcgtgatagttttcctcgatatctttgtcctgcatgatatggacaaacggacgtgcacgactgtgtttccaggcaccagccaattcgttaatcagcccttccgccggattgaagccgttgcctttatagccctgctccgcccaacgttcgaggatcaagcccgcttcggtatgacaggaggcggagtcggcgttgtactcgtaaaccttcaggccacgctcatccatgcagaaatccatacgaccagtgatcatatggtgacggcgacgctgccaggagagacgcaaacgtggccagaggattttcgggatgtcgaacagcgccagcaggttgtcatctttcagcaccttgtcggttgcgtgaagatacatcaggtgcagctcgttggtggctttaattagctcctgctcggcactctcggtaatggtgtagtaatgataaggatcctgattgatcacctgaccgttggcctgcacataggcgttttgcagcggatctttttcatccagccatttaccgtcaaactggcctttgttttccaggcgcgctccgctgattttcagcagctcgcctgcaatttccggctgcggtaagctgtattcagtatcttccgtctggatcatccagcccagaatggtggtgtcatcaaaagtgtctttcagggtatagcagccgttttcgaccaccatctccagctcgcgcgtccactgttgcccttgcggcaacggggaatgaatcacgttctgttccgcaatacggactttgttgccatgcaattgggtaatgatggcgacatggccagtgtctttaaattcaccgcctttatcccagataagaagcgcacccgcgaccggcgcacgcgggctgccgttaggaaatgcctgcaatggcaggatgttgtcattaaccacttctcgcaggaagcgcaggctgaaaatctcccacgccatacccacgtcagtaaagaccacaccgtaattcagaaagagaaaacggcgagcaaattcaacgcattgccacttgtggcccatatattcgtcgtcgatatagctacggaatacggcgtcatcttcgtattcctgcggatcgagagaactgtaatcactagagtagattgctaccccacctggggcgtagcccaataatgtcccgaacggggcatcctggctggtcgttcctttgctcatcactttacctttaacaatacaacctaagcagttggcgtaattgttgtgctctgattacctgctcagcgacattaaccggacagaggtcagactaatcatacacctcatcgcagcggctggcgcaaagggttaaaaaattcacattctgtacagcaagtgacctgctacactgcttcaacactaccactcagaaggcaactcactatgacagacaatacttatcagcccgcgaaagtctggacgtgggataaatccgctggcggcgcgttcgccaatatcaatcgcccggtttctggtccgacgcatgaaaaaacgctgcccgttggcaaacacccattgcaactttatagcctgggaacgccgaacggtcagaaagtaacgattatgcttgaggagctgctggcgctgggcgttactggtgcagagtacgacgcctggctgattcgtattggcgatggcgatcaattctccagcggctttgtcgaagtgaacccaaacagcaagatcccggcgctgcgcgatcatacgcataatccgccgatccgcgtgtttgaatctggtagcatcctgctttatctggcggagaaatttggctacttcctgccgcaggatttggcaaagcgtactgaaacgatgaactggctgttctggttacagggcgcggcaccgttcctcggcggtggttttggtcacttttaccattacgcaccggtaaagattgagtacgccatcaaccgctttaccatggaagccaaacgtctgctcgacgtgctggataagcaactggcgcagcataagtttgttgcgggcgatgagtacaccattgcggatatggcgatttggccgtggtttggcaacgtggtgttaggtggtgtgtatgatgccgctgagtttcttgatgcgggcagttataagcatgtacaacgctgggcgaaagaagtaggcgaacgtccggcggtgaaacgtgggcgtattgttaaccgcaccaacggaccgctgaatgagcagttgcatgagcgccatgacgccagtgatttcgagacgaatacggaagataagcgtcaggggtaagggttggtgttcgtcgcagcaagccatccaggccggataaggcgttcacgccgcatccggcaatcgtgcacaatgcctgatgcgacgctgccgcgtcttatcaggcctacgaaagctaatcatcacgcgctggtaatgtcgtaatccatttggcgcagtgcgtctaatgtggctttggcttcatcttcgtcgatgatgctcatggcaaatccgacgtgtaccagcacccactggcccagtagatcggcagggttaccttcacaaatcagggcgatattcacatcgcgcttgataccacatacttcaacctgcgcaagctggtgaatatcttcaccgacagccagcacctggcctggaacgccaatacacattattaactccggttattcaacttcaatacttttgacgatcaggctatcgccggtatcgacacgcaaccgctcgccgtgacagagcggacactgcgcatcgtgctgatgaatctccaccacctggctgcaatcccagcaccaagcctgggcgggtttatagacgatatgtaaatcgcacccttgcgccaccgttccgtggcagacaatttcaaaactaaaacggacggcgctctcctcaacgcaggagagcgcgccaatttccagccacacggcggtgacgcgcttaacatcgtgctgctccgcctgccgttggataatttcaacggcgctctggcaaagagacaactcatgcattttcgccactcctgcgaccaaacagcagggcgcgacgccctgcgtgtggtacatccggattcgtgactggcaggctaaggatcattcgtgcgcagtcatccgtcaggcgttggccctcttcaatgctcatgctgtggctaagcgggctcatcaggctacaggagagatattggctaacaccgtccagttcgccaacggtaaaggtcatagtgccatacggcagttgcagaccaattttttcactcactttgcgcagcggccagagttgatccgggccggggaagataactgcactcagcatccacggggtgatcacacaccccgtccactgaccttcgaacagcgtaaaatcagaaacatacaccggcatactaggatgcagaaaagagagatcgtgcatgctacgccgggcaatttcttcaaacgctgcctgtacttgcgccttcggggaggtctggaaacctgctatctcttcagtcatgaatcgcctcccgtgggatggcttccacgccagattcacgcagcgcagccagaacctgctcaagcgcaggttcaatcattgcttcaaccgtcggcgttaagccgatgtgtggctccaggctttccgggatcacgccgaccagggtcagctttttcggaaactcgccggtgaagcgcagggcgctcaagacgtcggccaggccaagctgatgcggagagattttgttggtaaacaacgccggaacttcttcatcccgcaggatcatcatcgttcccggcgcgttctttttgctgacaatggcatccgcaataatcaaatgatcgcgatttgccatgtcgccaagcagctccattcccgccgtgccgccatcgaggatctcaacataatccggcagaatgtatcgttgctctaacgcttcgacaatccgcacaccgatggcttcatcggtcagcaaaatattgccgacccctaagactaaaatacgcattacagaaccttcacactaaccacttcgttgccgtcagcatccactacgtgtaccgcacaggccatgcacgggtcaaaggagtgaatggtacgcaccacttccagcggtttattcggatcggcaaccggtgtacccaccaggctctgctcgtaaggaccgacgtcatcattgaagttacgcggaccagagttccaggtacttggaacaaccgcctggtagttgctgatgataccgtctttaataaccatccagtgagagagcataccgcgcggcgcttcgaggaagccaacacctttgaattcacccgttgccggaatgttcggcttcacaaaggtggtgtgatcgcctttgccgatattggtgatcagtgcactgtattggttttgcaggatatcctgcaattcacagcagtgaacggtacgaccaataatacggcccagcgtggagtgcagctgtgccacttccagcgtgttgccagtcagtttctgataaatcgcaacgatttcattcagtttgttctgggtagattcgcgacctgccgccagtttcaccagcatattagccagtggccccacttctaccgttttgccgtagaaagtcggacttttcacccaggaatatttcccgtcgtcagaccaaccatcataagccggaatggtggtgccttcccacggtgcctgcggcgcttcgtctttataccaggagtgcttcgcgctttcctgaatgcctttgatcaggtattcatcggaatgagaagtgatcggacgatagctggacagatccgcattctcaatgtagccgcccgggaacaggaagctgccgtttttactgtcggtcgggaattccggcacgctcaggtagttcaccgcacctttaccgcgtgtcagccattccgggtagaacgcggcaataactgcggtatcaaccttataaacctgctcaacaaagtcgctcagtttgtcgatgaaagacttgatgtacatcaggcgctcaaggttcagcacgcccaaaccgtcgaggttgatcgggttcgcgacaccacctaccgccaggttctgaatgtgcggcgttttaccgcccagcagcgccacgacgcggttagcgtcacgctggcactccaacgcttgcaggtagtgcgctaccgcaatcaggttcacttccggcggcagtttcatcgccggatgaccccagtagccattagcgaaaatacccaactgaccgctggcaaccagatctttgatcttgttctgaactttggtgaactcttccggactgttcaggtgccaggtgctaacgcctttcagcatttcggaggctttggttgggtcagcttgcagtgcagaagtgatgtccacccagtccagcgcgctaagctgatagaaatgaacaatatggtcatgcgtggtgtgcgcagccagaatgatgttacggatgtattgcgcgttaaccggaacgtcgatattcagcgcactttctgccgcacgaacggaagacagcgcgtgagtggtagtacatacgccacagatacgttgcacaatcatccatgcatcgcgcggatcgcggtttttcacgatctcttccatgccgcgccacatggtaccggaagcccatgctttgctaacgacgccattttcgatttcgcaatcgatgcgtaaatgcccctcaatacgggttaccggatcaatagtaattctctggctcatgctttgctcgcctcatgacgattatgatcgttttgttttaaaggaggaagtatcggcagtagacgaatgagtacgatgtaagcgcaaatctcaatagccacaaaaccaatagaaatcaacagttcttcccaggtcgggaagtaggcgtaaccgccgcccgggttgaatgccaccaggctataggtcagacgccaggttgcacaacctaacagtgcgctcagtgcactcaggaacagcatgcgggaatcattacgcagcttcgccacacgcagaacgaccagcgggaagagcatcagcaggacttcaatccagaacatcacggagtagaagtcaccggcaaacgctaagctcagcttgtcgcgatagataagctcgccaaagcgcagcacgatgaaaatcgccagcaacacactgatggtgttggtcagcttaacaaacagactcttttcatccggaccgttgccacgcagacccgcctgcaccaggctaccttcaaagatgacaatgctgaagcccatgatgaacgccgtcagcaggctgaacagcggcaacatttcatagctctgccacaacggatgcaccttgtagcccgcgctgatcatcaggctccccatactagactggtgcatggtcggcagcagcgcaccgagcgcgatgatgaagaacatcaccttgtttagtcgctgtaggctcaccttccaccccagacgttcaaacagtgccggagcaaactccagtgccatcacgccgatatagatggtcatacagaccgccgtctcgaacagtacgctgttcacgttgaagtgacccggaatgtagaagtacggcaggttccagtagcgacccacgtcgatagtgatgctcaagccacccagactgtaaccaaacagactcgccaacagcgccggacgcaccagcggatggtattgcccacggttaaagacgtataccgcccacgccagcgcccagccgccacaggcaaagccggtgccaatcagcaggtcaaacgcgatccacacgccccacgggaagccgccgttcaggtcagagacagagcccagaccgaacaccagacgcttcacaatcaggagcatacagatgacgattaacggtccaaaaatcatgaccggtttactgatgattttgccgcccagcggttgtggatcatgactcatgatcgtctcctccgtcgtgattattcaactctcatgatcgtctcctccgtcgtgatggtcgtttttggtgttgcgacgaaccagcacggttaagcccgccagcacagccagtggtagcatcatgcctttatacagggtgtgttgaatattttcggaacgcgcaccggtagaaagatcgtccagtttcggcaggtcgagattttcataaggcacacccgtcagtaccagaacctgagtaccgccgccctctttctcgccgtacagatgcggataatatttcggcaccgtatgcaggtaagtgtcgccagatttcagcgtctgacgcggatagtggtattcgctgccaggcttcagcgccagacgttttttcgcctccgccatcagctcttcacgcgtaccgaaaatcaccgcgcccgccgggcacacttctacgcagccaggtagaccgcctttatcgagacgttccacacctttctggttgcacagctcgcacttatgcagcgcaccaaacgggttgttgtagtcgtacttcggcacgttgtacggacaggcgaccatgcagtaacggcagccggtgcacacatctttgtcgtaatggacaatgccggttttcggatcttttttcagtgcagagaccgggcacacagagacacagttcggatcgacgcagtgcatacactgtttcttaatgtacgcgtagccgttctcctcctggtctttgttgacccctgtgccgctggtccacacctgaatgatgttattggtatacgggctcagtttgtcgttgttgctccaggtctgttccccttgcgggttacgttcagggaaattgatatcctgacacttggtgacgcaagcctggcagcctacgcacaaggtgctgtcgtacaacatccccaggcttcccggaattggcgggcggttttcagcagccgcatgactgacagacggcagcgcgcccgtcagcaatgccccgcaggaggctgctttaataaaattacgtctgttcacggttattctccccgactgtcagcgttatctttcttttgctgacgacccagttcacgcaccgccatcacgctgacaccggcaaccaacccaaccacaccgccgagcaaaccaatagcgcctgcagagacgttgccgccctctttagcgttaacatccggtttctgactacgcggagtttgattttcgacgttggcaagctgatggatgcctttatggaagccgataccttcttcgttacagccatagcaagggtgaccaatcgccaccggccacacaccgccaacatcgcagaattgcagcgtactgcagttgccgtaagtttctggccctttacagccgaggtggtacaggcaccagccttcgcggtggccttcatcaccgaactctttggcaaaacgaccagcatcgaagtgcgggcgacgttcgcagtgttcgtgaatcagacggccataggcgaaggtcggacggtttttgtcatccagtttcggcggtttgccgtaagtgatgatgtgcgcaacggtcgcgaggaagttgtgcgggttcggcgggcagcccggaatattgataacggttttgcctggcagaacttcttgcaggctgactgcgccagttgggttaactccagctgcggcaacaccgccccacgcagagcaggaaccgatagcgataatggctgctgcgccttccgccgctttgcggatgtgatccacaatcggctcaccggcaaccatgcaataaataccgttatcttttaatgggatggaaccatccaccactaacacatactgccctttgtacttctcgagagcgttatgtttgttctcttcgacctgatgaccgaaggcggcggaaagcacttcgtgatactccagagagatagtctccagtacgaggttttctaccgttggatgcgttgcacgaagcagagattccgtacaaccggtgcactcctgcgcgccaatccagataactggcggacgctgcgggttagtaacgctttcggccatctctgcagcggctttgctacttaaccccatggtggcggctaatgctgcacaaagcttcatgaaatcacgacggttaatgccgtgagaatggatgagggtgttatctccagtcatttatagttattccgttgcgaagacctggcatatattttgcctcaatcgcaaaatcaataatgcgatcgatgcgccatttaccacacatttattatggttatcgatatcatgatactgcggcggggcgctaaaacgaagggaagaagcattagtgtaattaattaaagcaagataatacgtatgtttgatcaattttcgaggcgataaccggccataaaaaagcgcaacgtagaacaggaattattctcacgaaagaaatccattaccatctctttatccagtccatagcggcgcgtcagaatacccgcttcccaggcgctaagctggcgatctccggtcttttcgtacatccggtgactgtagcctaatacaaaaccgcgtttataatcggcacagaattttgtcacattaaccgcactgtcggcatgcgttgcttttaatcccgccattaagcctttaccaaaatggttattcatcgttcacctcattcgctatatattgtcatatatagcgatattttaggcaaagaacgacttttgcgcacgctattttttcatgcttgtttaagacgtaatcccgtaagagataaacctatcaggagagatatttatcgaaccatttcagtgtcctttgccaggcaagatcggcggcagatttgtcataacggggcgtggaatcattatggaatccgtgattaacccccggatagatatacgcctcataaaccttattattggctttcaacgccgcctcgtaagcaggccagccctcgttgattcgggtgtccagttccgcgaagtggagtagtaaaggcgcttcaatcttcgccacatcggcagtgggtgcctgacgaccataaaacggcaccgcgcaggccagttccggatacgcgacagccgccgcgttgcttacgccaccgccatagcaaaatccggtaatacccactttgcctgtcgcttgcggatagcgttgcataaactcaattgcggcaaagaaatcattcatcagtttgttggatcaacctgctgttgcagctcacgacctttatcatcatttcccggataacctccaacggaacttaagccgtcaggtgccagggcgatataccccgccttcgccactcgccgtgccacatcttcgatatacggattcagtccacgattctcatgcaccaccactacggctggcgttttgccgctcatctttgcgggcttcaccagataaccccgcacctcgccgtgaccatttgggctaggatacgtgatgtactcagcaacaatttccgggtcggtaaactctacctgagtcgccagcgcataatttggcttgagcaaatcaaacaacgctaatgccgtcatcccgcctaccgcacttcgccgcaaggttgaggaactcacgtttcgagattttcccgtgagcgtaatagtcatagtaatccagcaactcttgtgggaaatctttggcggttaaacgcggcatcgttgcactcctcagttggtgtttttttaagcaaagcataagcacgtatttttgcccagtttttcgtcactctgtgagccagactacgggatacgcgctggcgaatcgctaaactagaaacattgtttcgaaattgaacggtggaaaggagaggtcatggtctggttagcgaatcccgaacgttacgggcagatgcaataccgctattgcggaaaaagtggtttacgcctgcccgcgttaagcctcggtttatggcacaatttcggtcacgttaacgcgctggaaagtcagcgtgcgatcctgcgtaaagcgtttgatttgggcattacgcactttgatttagccaacaattacgggccgcctccaggaagcgcagaagagaactttggtcgcctgctgcgggaggattttgccgcttatcgcgatgaactgattatctctaccaaggctggctacgatatgtggcccggcccttacggctctggcggtagtcgtaaatacctgctcgccagcctcgaccaaagcctgaagcgtatggggcttgagtatgtcgatatcttttactctcatcgcgtcgatgaaaatacgccgatggaagaaaccgcctctgcgctggctcatgcggtacaaagcggtaaggcgctgtatgtcgggatctcctcttacagcccagagcggacgcaaaaaatggtcgagttgctgcgcgagtggaaaattccgctgttaattcatcaacctagctacaatttactgaaccgctgggtggataaaagcggcctgctggataccctgcaaaataacggcgtgggctgtattgcctttactcctctggctcagggattgctgaccggaaaatatctcaacggcattccgcaagatagtcggatgcatcgtgaagggaataaagttcgtggtctgacaccgaaaatgcttaccgaagccaacctcaacagcctgcgcttattgaatgaaatggcacagcagcgtggacaaagtatggcgcaaatggcgttaagctggttgctgaaagatgatcgcgtgacgagcgtattgattggtgccagccgcgcggagcaactagaggagaacgtgcaggcgctgaataatctgacatttagcaccaaggagctggcgcagattgatcagcatatcgccgatggcgagctgaatctgtggcaggcgtcttccgataaatgacctgttaataacgggcgcgcgaaccgcgcccgaatcagatcagtgattatgacgagtcagtcggtcaagatagcccatcacaaatgcagaaagcacaaacgtcagatggataatgacgtaccacatcagtttgttatccgggacatttttcgcatccataaagacgcgcagtaagtgaatggaagaaattgccacaatgctcgctgctactttgtttttcaggctcgttgcgtccattttccccagccagttcagcttctctttgttctcggagatatccagctgactgacgaaattctcataaccggaaaacatcaccatcaccagcaaaccgccaaccagcgtcatatccaccaggctcagcaacacgaggatcaaatcactttccgccatgctgaagatattcggcagtacgtgaataatctcctggaagaacttcagcgccagggcaactaacgccaggctaaggccaaagtacacgggggcaagcagccagcgagaagcatacattgcattttcaagaaaacgttccatacattcctgtcgtgtagttaaaacgggcaacagtatatcgcaattgagtaaacagcacgcaacagcaaatcaacatatacgttaaacctttgtcgcataattctgaggtttagggatcttcctggttcccttatcaacgcatcgagaacgtctacccttaaaggacgttgaacctgaagggagaaaaacgatgtctcatttaaaagacccgaccacgcagtattacactggtgaatatcccaaacagaaacaaccgacgccaggcatccaggcgaagatgacaccggtaccggattgcggcgagaaaacctatgttggtagcggtcgcctgaaagatcgtaaagcactggtgacagggggcgattccggaataggtcgcgctgccgccatcgcttacgcgcgtgaaggggctgacgtggcgatcagttatcttcccgtggaagaagaagacgctcaggatgtgaaaaagatcattgaagaatgcggacgcaaagccgttctgctgccaggcgatttaagcgatgagaaatttgcccgtagcctggttcacgaagcgcacaaggcgttaggcgggctggatattatggcgctggtcgccgggaaacaggttgccattccggatattgcagacctcaccagcgaacagtttcaaaagacctttgccattaacgttttcgcgctgttctggctaacccaggaagcgatccccctgctaccgaaaggtgcaagtatcatcaccactagcagtatccaggcataccagccaagtccgcatttactggactatgcggctacgaaggcggcgattctgaactacagccgtggcttggcaaaacaggtcgcggagaaaggtattcgggtgaatattgtcgcgccaggcccgatctggacagcactgcaaatttccggcggacaaacgcaggataagatcccgcagtttggtcagcaaacgccgatgaaacgtgcggggcaaccggcggaactggcccctgtatatgtttatctggcaagtcaggagagcagctacgtcaccgcagaagtgcacggcgtgtgcggcggcgagcatttaggttaaaaaaatgcccggttgtgaaaagcaaccgggcatcattgtgaattcactcttacctgatgtggcgaaaacgccttatccgcctacaaacgcatgaagattcaacatgttgcaatagattttgtaggcctgataagcgtagcgcatcaggcattgagcacctaatgccggatgcgtcgtgaacgccttatccggcctacaaacgcacgaagattcaacatgttgcaatagattttgtaggcctgatgagcgtagcgcatcaggcaattctactttacttcgctttggcggtttcttcgccgaccagacctatcttcaggtaacccgcctgatgcagcgtatccattaccttcatcaacgtctcgtaatcgacggttttgtccgctcggaagaagatggtggtgtctttcttgccttcggttaacgcattcaacgccgtaatcattgtttcatcggtgaccggatcgttaccgataaacatgctgttgtctgccttcacgctcagataaaccggtttttccgggcgcggctgcggcgtgctggtagaagcaggcaagttcaccttcacatctaccgtcgctaacggtgccgccaccataaagataatcagcagaaccaacatcacgtcgataaacggcgtcacgttgatatcatgcatttcgccgttatcgtcgaggttttcgttaagatgcattgccatcggatattatcctgcgcgtaatttttgtgcgacacgaaccggatgcgcagcggcgctggcttccagatccaggtcacggctttgcagcaacaatacctgcgctgcaacatcacccagcatcgctttaaagccgccaatctggcgtgcaaatacgttatagataacgaccgcaggaatcgctgccacgaggccgattgccgttgctaacagagcttctgcgatacccggcgcaacgactgccaggttagtggtctgcgtttgcgcgataccaataaagctgttcatgatgccccagaccgtaccaaacagaccaacgaacggagaaatcgcgccgatggttgccagatagccgttaccgcggcccatttgacgacccactgcggcgacccgacgctccagacggaagctggtacgttctttaataccttcgttatcgtcgctgccttcactcagttccagctcattctgcgcttcattgagcaaatgcaggcttaagcttttgctaccaaaatcagcggcgatatcgttggcctggtttaaggaacgcgcttcagccagcagttgctgctcgcgcttaaggcgacgcttctgattgaagaactctacgctcttactgaagaagattgcccaggtgactacggaggccaaaataagcccaatcatcacgcacttaacgacaatatcggcgtgctgatacataccccagacggaaaggtccgtctgcattaaattattacccactgtgtatctccaggacgcaagtcacaaaatctgcgcataataatatcaaaacgacgtcgaattgatagtcgttctcattactatttgcatactgccgtacctttgctttcttttccttgcgtttacgcagtaaaaaagtcaccagcacgccatttgcgaaaattttctgctttatgccaattcttcaggatgcgcccgcgaatattcatgctagtttagacatccagacgtataaaaacaggaatcccgacatggcggacaaaaagcttgatactcaactggtgaatgcaggacgcagcaaaaaatacactctcggcgcggtaaatagcgtgattcagcgcgcttctagcctggtctttgacagtgtagaagccaaaaaacacgcgacacgtaatcgcgccaatggagagttgttctatggacggcgcggaacgttaacccatttctccttacaacaagcgatgtgtgaactggaaggtggcgcaggctgcgtgctatttccctgcggggcggcagcggttgctaattccattcttgcttttatcgaacagggcgatcatgtgttgatgaccaacaccgcctatgaaccgagtcaggatttctgtagcaaaatcctcagcaaactgggcgtaacgacaagttggtttgatccgctgattggtgccgatatcgttaagcatctgcagccaaacactaaaatcgtgtttctggaaagcccaggctccatcaccatggaagtccacgacgttccggcgattgttgccgccgtacgcagtgtggtgccggatgccatcattatgatcgacaacacctgggcagccggtgtgctgtttaaggcgctggattttggcatcgatgtttctattcaagccgccaccaaatatctggttgggcatagtgatgcgatgattggcactgccgtgtgcaatgcccgttgctgggagcagctacgggaaaatgcctatctgatgggccagatggtcgatgccgataccgcctatataaccagccgtggcctgcgcacattaggtgtgcgtttgcgtcaacatcatgaaagcagtctgaaagtggctgaatggctggcagaacatccgcaagttgcgcgagttaaccaccctgctctgcctggcagtaaaggtcacgaattctggaaacgagactttacaggcagcagcgggctattttcctttgtgcttaagaaaaaactcaataatgaagagctggcgaactatctggataacttcagtttattcagcatggcctacagctggggcgggtatgaaagcttgatcctggcaaatcaaccagaacatatcgccgccattcgcccacaaggcgagatcgattttagcgggaccttgattcgcctgcatattggtctggaagatgtcgacgatctgattgccgatctggacgccggttttgcgcgaattgtataacattgccacttttggacaattttgcagacattttattgtgaaaagtcttaaattgttgcgtccgggatcaaggcgtcccggacgattcaggagtacaataggcagataaaggcttaaacgctgttccacaggaaagtccatggctgttattcaagatatcatcgctgcgctctggcaacacgactttgccgcgctggcggatcctcatattgttagcgttgtttactttgtcatgtttgccacgctgtttttagaaaacggcctgctgcccgccagttttttgccaggcgacagcttgttgatactggcaggcgcattgattgcccagggggttatggattttctgcctacgattgcgattctgaccgccgcagcaagtctgggctgctggctaagttatattcaggggcgctggttagggaataccaaaacggtgaaaggctggctggcacagcttcctgctaaatatcaccagcgcgccacctgcatgtttgaccgccacggtctgctggcgctgctggctggacgttttcttgcatttgtccgtacgctgctgccaaccatggcgggaatttccggtctgccaaaccgccgcttccagtttttcaactggttaagtggattgctgtgggtcagcgtggtaaccagttttggctatgccttaagtatgattccgttcgttaaacgccatgaagatcaggtaatgacgttcctgatgatcctgccaattgccttgttaaccgctggcttgttaggcacgctgtttgtggtgattaaaaaaaaatactgtaacgcctgacgattttccccgttcccggttgctgtaccgggaacgtatttaattcccctgcatcgcccgcattcttgccgcatcttcccccggcgtcacaccgaagtaacgtttaaactcacggctaaattggcttgcgctttcatagccgacgcgcatcgctgctgcgctggccttcatgccgtcatggatgatcatcatccgcgccttatgcagacggtaattcttcaaatactgcaacgggctggtactggtgacagacttaaaattatggtggaacgcgcttacgctcatgttggcttctgccgccagttgctcgacgctcaggttttcggtgtatttattctcaatccgtttcagcacgcggctaatcagactgaagtgagtctggcgactgaccagcgccagtaacgcgccgccgcaaggtccggtcagcacgtagtacagaatttcgcggatgatctgtttgccgagaatacgcgcatccagtggtcgctccatcacgtcgagtaaccgctccgccgcgcataaaatctcttcacttaacgtggcggagttaatcccgctggctgccatgctcggctggaaatgctcatcttcgccaatgtccatcaacagttcctgtaactgcaaaatatcgacattgagacgcaaccctgccagcggcacctcactcgtggcataggtttcgcactcaaacggcaacggcaccgtcagcagcaggtattcattggcatcataacgaaacacgcgttcattgatataaccgattttatgcccggaaaagagaattatgatgccaggctcgtacatcaccggtgtacgtgcgaaaggcgtctcgccatacaacaaacgcacatcgggcaacagtccactcaaactattttctttatttttcagtttattaactttatccgccagcaagcggcaaatctcttcacgtttcatatcgcgtaatttcttaggaataatgcggcaattactttgtgcgcaattttgtagcatttctccagcactctggagaaataggcaagacattggcagaaatgagcattgagagccagggcgctggcgatcacaatgaaaaacatcaggcagatcgttctctgccctcatattggcccagcaaagggagcaagtaatgaacaactttaatctgcacaccccaacccgcattctgtttggtaaaggcgcaatcgctggtttacgcgaacaaattcctcacgatgctcgcgtattgattacctacggcggcggcagcgtgaaaaaaaccggcgttctcgatcaagttctggatgccctgaaaggcatggacgtgctggaatttggcggtattgagccaaacccggcttatgaaacgctgatgaacgccgtgaaactggttcgcgaacagaaagtgactttcctgctggcggttggcggcggttctgtactggacggcaccaaatttatcgccgcagcggctaactatccggaaaatatcgatccgtggcacattctgcaaacgggcggtaaagagattaaaagcgccatcccgatgggctgtgtgctgacgctgccagcaaccggtagtgaatccaacgcaggcgcggtgatctcccgtaaaaccacaggcgacaagcaggcgttccattctgcccatgttcagccggtatttgccgtgctcgatccggtttatacctacaccctgccgccgcgtcaggtggctaacggcgtagtggacgcctttgtacacaccgtggaacagtatgttaccaaaccggttgatgccaaaattcaggaccgtttcgcagaaggcattttgctgacgctaatcgaagatggtccgaaagccctgaaagagccagaaaactacgatgtgcgcgccaacgtcatgtgggcggcgactcaggcgctgaacggtttgattggcgctggcgtaccgcaggactgggcaacgcatatgctgggccacgaactgactgcgatgcacggtctggatcacgcgcaaacactggctatcgtcctgcctgcactgtggaatgaaaaacgcgataccaagcgcgctaagctgctgcaatatgctgaacgcgtctggaacatcactgaaggttccgatgatgagcgtattgacgccgcgattgccgcaacccgcaatttctttgagcaattaggcgtgccgacccacctctccgactacggtctggacggcagctccatcccggctttgctgaaaaaactggaagagcacggcatgacccaactgggcgaaaatcatgacattacgttggatgtcagccgccgtatatacgaagccgcccgctaagctttttacgcctcaaactttcgttttcgggcatttcgtccagacttaagttcacaacacctcaccggagcctgctccggtgagttcatataaaggaggaacgtatggctaatccaaccgttattaagctacaggatggcaatgtcatgccccagctgggactgggcgtctggcaagcaagtaatgaggaagtaatcaccgccattcaaaaagcgttagaagtgggttatcgcagcattgataccgccgcggcctacaagaacgaagaaggtgtcggcaaagccctgaaaaatgccagtgtcaacagagaagaactgttcatcaccactaagctgtggaacgacgaccacaagcgcccccgcgaagccctgctcgacagcctgaaaaaactccagcttgattatatcgacctctacttaatgcactggcccgttcccgctatcgaccattatgtcgaagcatggaaaggcatgatcgaattgcaaaaagagggattaatcaaaagcatcggcgtgtgcaacttccagatccatcacctgcaacgcctgattgatgaaactggcgtgacgcctgtgataaaccagatcgaacttcatccgctgatgcaacaacgccagctacacgcctggaacgcgacacacaaaatccagaccgaatcctggagcccattagcgcaaggagggaaaggcgttttcgatcagaaagtcattcgcgatctggcagataaatacggcaaaaccccggcgcagattgttatccgctggcatctggatagcggcctggtggtgatcccgaaaagcgtcacacctagtcgtattgccgaaaactttgatgtctgggatttccgtctcgacaaagacgaactcggcgaaattgcaaaactcgatcagggcaagcgtctcggtcccgatcctgaccagttcggcggctaacatgcaaattctcccggtggcggtaatgttccgctaccggacttttcagaaatcatttattcccctcgcgtcccgcccgttgttactcttccttgttcaggaatgccaaatataaggacatcatcatgcagagccggaagctcttaaaagaacaactcatctatatccgggataaacgcaacggagaggtgaaaaacagatgaaaataatacttctgtttttagcagccctggcaagttttaccgtacacgcacagccccccagtcagaccgtagaacaaacagtccggcatatttatcagaactataaaagtgatgccactgccccttattttggtgaaaccggagagcgggcgataacttctgcgcgtattcaacaggcgcttaccctgaacgacaatcttacgctgccgggcaatattggctggctggattatgatccggtttgtgattgtcaggattttggcgatctggtgctagaaagcgttgcgataacccaaactgacgccgatcatgccgatgccgttgtgcgctttcgtatctttaaagatgataaagaaaagaccacgcagacactgaaaatggtggcggaaaatggtcgttgggtcattgacgatattgtcagcaatcatggcagcgtcttacaagcagttaatagcgagaatgaaaaaacgctggccgctttagctagcttgcaaaaagaacagccggaagcctttgttgccgaactctttgaacatattgctgattatagctggccgtggacgtgggtggtttccgactcttaccgccaggcggttaatgccttctataaaaccaccttcaagacggccaataatcccgatgaagatatgcaaatagaacggcaatttatttacgacaatccgatctgttttggcgaagagagcctatttagtcgcgttgatgaaattcgagtcctggagaaaaccgccgattccgcccgcattcatgttcgttttacgctgaccaatggcaacaacgaagagcaagaactggttttacagcggcgcgaaggcaagtgggaaatcgctgattttatccgcccgaacagcggcagcctacttaagcagattgaggcaaaaactgccgccagattaaagcaatgagctgaattaaataacaattagccggaacaataaataaaagggaacactatatgaaaacgattttcaccgtgggagctgttgttctggcaacctgcttgctcagtggctgcgtcaatgagcaaaaggtcaatcagctggcgagcaatgtgcaaacattaaatgccaaaatcgcccggcttgagcaggatatgaaagcactacgcccacaaatctatgctgccaaatccgaagctaacagagccaatacgcgtcttgatgctcaggactattttgattgcctgcgctgcttgcgtatgtacgcagaatgataaaaaaatccccggtagcgtgtcagttgccggggatattttttaacgtccaaccgccgctttaggccgtttcttcgcaccagcattcaccggacgagattgcgtagagctcgctttttttgccgtagcaggcgtctgacgctgggtcgccatcggcgtatgtttcgtcaacgccggacgggtattgcggttctggcgacgagcttcacgcatctcttcaatggttggcgcaggcactaagcaatcgcgacggctgccaatcagatgctttttgcccatcgcttccagcgcctggcggattaacggccagtttgccggatcgtggtaacgcaacaacgctttatgcaaacgacgctgtttgtcgcccttcggtacgaagacgtcttcgctcttataaccaatcttcgccagcgggtttttcccggtgtaatacatggtggtactgttcgccagcgggctcggatagaagttctgcacctggtcgaggcggaagcggtgctttttcagccacagcgccagattcaccatatcttcatcacgcgtaccggggtgcgcggagatgaaataggggatcagatactgctctttacctgcctgtttactgtaagtatcgaacagctctttaaagcggtcatagctgcccatgcccggcttcatcatcttgcttaacggcccttcttcggtatgttccggggcaatcttcagataaccgccgacgtgatgggtcgccagttctttgatatagcgcggatcttctacggctatgtcataacgcacaccagaggcaatcaggatctttttaatgcctttcagatcacgcgcacggcgatagaggttgatcgttggttcgtggttcgtgtccatgtgcggacaaatatccggataaacgcagctcaaacggcgacaagtttgttcagcgcgtgggcttttgcagcgcaacatatacatgttggcagttggcccaccaagatcggaaatcacgcccgtaaaacctggaacggtgtcgcggatcgcttcgatctcattaatgatgctatcttcggaacggctctgaataatgcgcccttcgtgctcggtgatagaacagaaagagcagccgccaaagcagccacgcataatgttgacgctaaaacggatcatttcgtaagccggaatacgggcattgccataggccggatgtggcacgcgcttgtatggcagcgcaaaaacgctgtccatctcttcggtagaaagcggaatagcaggcgggttgatccacacatagcggtcgccgtgtttttgcatcaatgcgcgggcacagcctgggttggtttcgtggtgcagaatacggctagcatgggcgtacagcactttatcgcccttcactttctcgaaagaaggcagcaacacgtaggttttttcccacggtttcgggcgcggtggctgcacggttacggctttggcttcctgctttttcggtgccaccggtttgttatccgcgcacggcaaatcttcaccatacggatgcgggattgggtcgatttttccaggggtatcaagacgggtggaatccacgccgctccagccaggcagcgcctctttcacgataatcgcggtattacgcacatcgcggatttcactaattggctcgcccatcgccagacgatgcgccacttccaccagcggacgctcaccgttaccaaacatcagcatgtcggctttgctatccaccagcacggaacggcgcacggtatcggaccagtaatcataatgcgcggtacggcgcagactagcctcaataccgccgaggatcaccggtacatctttccacgcctctttacaacgctgggtataaaccagtgtggcgcgatccgggcgcttacccgcgacgttatccggcgtgtaggcatcgtcatgacgtaaacggcgatcggcggtataacggttgatcatgctatccatgttgccagcagtaacaccgaaaaacagattcggtttacccagacgcataaagtcgtctttgctgctccagtccggctgggcgatgatcccgacgcgaaagccctgcgcttccagcatacgaccgcaaatcgccatcccgaagcttgggtgatcgacatacgcgtcgccagtaaccaaaatgatgtcgcagctatcccagccaagttgatccatctcttcacgagacatcggcaaaaacggtgccggtccaaaacaggcggcccagtactgcggccaggagaacaggtcgcgatccggttggatcagggagatagagctcattttgcttccagaaatgataaaaaaataatcaaaggccggggattataagccggaacgaaagagaaatcgaaaggtattccatactcgccctcctcgggcgagtatgaagattacggtaccggattgaccaacagttgcccaatgctgccacggtccgccatttccagcgtctgactgttgaagtagaacgggaagtgcgcccaggaaggctgaccgaaataaacaagcagctccacttgtccgtcaacccaaacggtatctttccagcctctgtcttccgggaacggcatcgcgccattcacgttacggatctggaacattacgccttcaatatggaacgcttgcggctcgtccgcgcgtaccgtccagcgttcccacgttccttgctgcgcggtgacatcaatacggttgacgtcccacagctgtccattaatacccgggtcatcacccagactgatatcgcgactgcgaattgggctaccagccatgatttcagttggcagcaagcgcatcggaagactgtctgtgaccagcggcagaaggccggttgggcgcagcgttagcaccagggtagaaaccagaatactggatggctcaaagaagccacgaatacgatcaacaatgctcgccgcttcgccacaggtgatgctcacttcatcgccgttgctcatatccaccagaatctcgcggcgctcgcccggtgccaggctaagttgcttcacgcttacaggagcaggcaggaatccctgatcgccagaaatcacatgtaacgggcgaccatcgttcatctgtagttgatagcgacgagagttgctcgcgttcagcagtcgcaagcgcacccagccacggctgacttcaacgtacgggctttgtacaccgttaaccagcagcgtatcaccaacaaagccgccgcttcccggttcgttgtattctggcgtaccaaagttatccagccgtttatcctggataatgaccggaaaatcatccacaccataatggttggggataggcaggctcttgctgacttcatcttccaccagccacattccggcaaggccgttatagacctgctgagccgtgcggttgggagtattggcgtgataccacagagtagctgcgttctggcgaatgggcagtacgggtgcccagtcagcgtttgggctcatcatccgtgccggaccgcccatcagcgggcctggtacctgtagcccggccaccgtcatactgacattttctgtcaggcggttgctgtaaataagcttaacatcgtcgcccttccagacgcggatagtcggccccaggtaacgaccattgattccccagacgctcgcgcgtgtccctggcgtaaaactccagtgcgcacgttgtacagtcataaacagcggttgcccacggcgagattcaagtagcggcggaacgggtagcggttgctgttgcccggctgcgctggccttcaggggaacagcgcctgcacaaagtgcaatcccgcttgcctgaatgaactgacgccgactgagactcatatttgctccatgtaaaactggctaaagtaataccgtgcaggaaagtgttccccgcaaaaatacagattgccgacttaaacttttccggcggcttcgcgttctgcgacttctttatcgagctcggcgattttttgttccattatgctacgacaatgggcagccagctcacgaacctgatctttgccatactgactgacgtcaattggcggcagcatttcgacaatcaccagaccgttgtgcagtcgattaagattaatcttattgctagttgtagagacgcacacgggaataatcgggacgcccgccgcaattgccgcgtgaaatgctccagtcttgaacggtagcaggccgcgaccacggctgcgggttccttccgggaacatccagatggaaatacggcgttttttgaagtgattcactacttccgcaatggtgccgtgagctttagtgcgattgtttctgtcgatcaataagttgccggttaaccagtacaactgcccgaagaaggggatccacagcaagctctttttacctaccgtcaccgtcggcggttgcacgatgttgcttgctgtcaccatgtcatagttgttctggtggttagcgatatagatagcattgccgtagctttcagcgtctgtaggtttacggcactcaactttcaggccaaacagcggcgcaagacggccaaacatatgcccaaaggtggccacatgtttcgggttacgcgggctgaaaaggcagtaaatggagccgaatacacagactaagatgctgtaaatcacggtaataataagacgaaagatatatagcataacaccctctgaaggtctgagagactggcattgtacgtcacctgaaatcaggttagggcattgttaaaagccgctctctggaaaagcgtattgttaatcgcaacgcatgaataaacaacggtttcaagggaatttttatcgtttccgggggttgaatacgctgccggatgacgacttaacgtttcatccggcgttccttgcaagcgggaggaaacagcgccctccccggcatattactcttcgctatcaccgctgctggcacggcgaggagagtcgatctcaacacgatcgatacgctgcaaaccgcgcatcaacgtaccgcggcgtccacgttcgccagtgactttctgtaactcttccgggcgcagtttaattttgcgtttcccaacatgaatggtcagcgtgctttgcggcggcagaacgtacaattgcgccagaccatcttctccacgcgcggcttctgcgcttggaatgttgataatcttgttgcctttgcccttgctcagctgcggcagatcacttaccgggaacatcaacatacggcctgcctgagtgattgccagcagcatatcggaagcatcttcaatcaccaccggcggcataacatgggcattttccggtaaggtgatcaaagccttacctgcacggttacgcgccaccagatcgttaaaggtgcagacgaaaccgtaacccgcatcggaagccatcagcagtttctgatcgtcgctttccatcagcatatggtcaacggtcgccccaggcggcaacgttaatttgccggtgagcggctcgccctgaccacgcgcgctcggcagcgtaatcgggtcaatggcatagctacgaccggtggaatcaacaaacactaccggttggttgctcttacctttcaccgccgctttgaagctatcacccgctttataattcaggcccggcgcgtcgatatcatggcctttagcgctgcgtacccagcccatctggctcagcacaatggtgacaggttcagacggcagcatgtcgtgctcgctcatcgctttcgcttcttcgcgttcctgcaacgggctacgacgatcgtcaccgtaggcttgcgcgtctgcctgcagttctttcttcagcaggttattcattttacgctcggaagccaaaatgccctgcaactggtcgcgctctttttccagttcactctgctcaccgcgaatcttcatctcttccagtttggcaagatgacgcagtttcagttcgaggatcgcttccgcctgggtttccgtaaggccaaaccggctcatcagcgccggtttcggttcatcttcattacgaatgatctcaatcacttcgtcgatattgagaaacgccaccagcaaaccttcgaggatatgcaggcgcttgaggactttctccagacgatagttcagtcggcggcgcacggtatcgcggcggaacaccagccattcggagaggatttccagcaggtttttcaccgccggacgaccatccagaccgatcatattaaggttaatacgatagctcttttccagatcggtggtagcgaagaggtggttcatcacctgatccatatccacgcggttggaacgcggcacaatcaccaggcgggtcgggttctcgtggtcagattcatcgcgcagatcgtcaaccatcggcagctttttgttgcgcatttgcgcagcaatttgctccagtacgcgcgcaccactaacctgatgcggcaatgcgctgataaccaccgcgccatcttctttcttccacaccgcgcgcatacgcacactaccacgtccgttctcgtagattttacggatctcggcgcggctagtgataatttccgcttcagtcggataatccggcccctgcacgatatccagcagctgatcgagcgtggttttcggctggtcgattaatgcgattgccgcctgagccacttcacgcaggttatgcggtggaatatcggtcgccatgccgacggcaataccggtggtgccgttaagcaaaatgtttggcagacgggcaggtagcattttcggctcctgcaaagtgccgtcgaagtttggcacccagtcagccgtcccctgccccagctcgctcaatagcagctcggaatatttgctcaaccgggattcggtgtaacgcattgccgcgaagcttttcggatcgtccggcgcgccccagttcccctgaccatcaaccagcggataacggtaagagaacggttgcgccatcaggaccatcgcttcataacaggcgctatcgccgtgcggatggtatttacccagtacgtcaccgacggtacgggcgctttttttaaatttggcgctggcattcaggcccagttcagacatcgcatacacaatgcggcgctgaacaggtttcagaccatcaccaataaacggcaacgcacggtccatgatcacgtacatggagtagtttaagtaggcgttttccgtaaattcatgtagcgcaaggcgctctgccatatcgctcattaattctgattcctcaacttattcgccagccttcaaaggggcaatattgccggagatactacattatctgccgcgtcgagtcacaggagatcaacgtgaatagcgccgccggacgtgctccgacggcgataaaggcatcaatgtgccttgatatacaactctttgctgtagacataatcctggggattatgcagcggaaaaccgccaacgtagggtttaagcagtttgattaacggctgatagtagataggaatcagcggtgcctgttggttgatgatcacttctgcctgctgatacaacgcattacgctttgtcgcatcagtgatctgcgtggcctggtttagtaaggcgtcatactgcgcatttttccagtgaccgacgttttcttcactatcgcttttgagcgtgttcaggaagctggaagcatcattgtacgtcgcatcccagctctgccgagacagcatgaaatcaccggctcgtcgggcatcaagataggttttccactccattgtgcgcagcgtcacctgtgcacccagccattttttccattcggaagacaacgctatcgcggtcttttcatgcagatcgtacttgttgtagaacagctcaaagcgtagcggatgagaggcgtcgtatcccgcctgtttcagcaaggcttttgccatcgcgacgcgctcactcattggcttttgcagttcatcgaacgtcgtcgcgctaaagccttttacctctggcggcgtcagcgtggttgcgggcgttctcaaccccagtaccttttgcgcaataagctgtcgatcaaccgtaagatatagcgcccgacgcactcgcacatcgttaaatggcggtttctcaaggttgaagttgtaatattcgctgttcagacgcggaataattcgtagctcgccaggcagacttttttcaatggcgggaatttgctgcgccggaacccaggtgagatcgacctctcccgcgcgatagcggttatagccggtgacgctattatctagcgccagatactcaacctgttgcaatactgtatgttgcgcatcgcggtactttggatttttgcgtgcagtaatcttttcgttaactacccactgatcaagcacaaaggcaccgttgtaaaccatgttctctggcttactccagctatcgccatgtttagcgatgacatgatgaggaaccgggaacagcgtcggccaggcgagcatcgtcgtgaaccaaggaaccggctgctcaagcgtaacttcaagagtacgatcatccgtcgctttgacacccaggcttgtaacatctgctttacccgcaacaatagctgcggcattgttaatgtgcgcctgtgccagatagccagcaaaagggcttgccgttttcgggtcaaccgcgcgctgccagccgaggacaaaatcctctgccgtcagaggctgaccgtcggaccactgcaaaccgctacgcagatggaaaatatagcgcttgccgccgtccagtatctcccagcgttcagcctgagcgggctgcacctggccttcaccgtccatccataccagaccttcaaacagatccagcacaatctgcgcggcagtattctcctccaccttttgcgggtcgagcgtacctgggtcgctatgattgttgtaacgaaagacttgttgcggggcgagcggtgtgttggcgggaacgtcagcagcgtagagaggagccgcacttaccaggctgaccagccataataaatttcgcgtatacatggtattccttaccggagaaattataagcccaacaacaatacgcctgtggcattgttcgctcaaacttatcgcgagtgatttggctcacactccggtaaagaaaaaagcgagttgcccccgcttttccattaattaacggatttcattcaatagttctggatgcttatccagaacacgtaaaagtttgattgtggaaggatgaggttgggcattgcctttttcgtaacggctaaacgcatttacacctcccccaaaaatttcgcttgcctctttttgggtaagagagagcttttttcgaaccttcactataaattcaggtgccactgtttcggcattcacgctagcccgaaatgcctttacttgcgccatgaaagcatcactctcttctttattcatgatgctctcttcgcaatggacacaatataaaccgtggatacctttcaatactgtttttcgtccacggaaggtgtatggaatatctttaatgccagaaaccatttctccctggtggcaaaccggacatttcatattacttctccttaaagctgacgatcagtacgtcatgaattaccgtaattttaagataaacctggcctgtaacaagcctgggtctgtaaacatcctgccagatagtatgatcagagtaggtggtcatgcttttataaaagtcgctctcacttaatccaatgataacattacacataccatcaaaatccaaacctaactcatctgcatttaacagggcactacgtgttgtacgaacttgcccggcattgacaagttttttaacctgactcaaacgtgtatgtggtgtgcgtttttccataacccccgcctccctgttactttagttataacctaaaaggttaattacagcaatgaaaaagcacctaaaaggttagttagatgtacggagatagtgaccacacaaaacgtattctttaaggaaagtgattgaccatataagaaagtggcgcattagtagcgccagtttgaagcaggaatttataagggaagctggagtcaggcatcacgccaacggcacataaacatccgtttccagtcgctgctctgtcaccccttcggcaagattggtgtagtgaaacagaatcggtgctttacgcattttctcgccgcttgcaggcagccagtggcgaatgatgccccataccgtgtgactaatatcgtccagctcgccaacgtggcgggccacggcataacgtccaccggtaagttcaccattgctcacaccataacgattatcgggaatcggttcgctaacgctgccgcagatatcaaagcgaaacgcttccggtgcggtggtggcagggtcgtcccaggcgacgccaaaagtctggctttggttaacaggagaaagccccgtctctttacgccacatgataaatttcgccacgctgtagttgagcaattcagggctacagcggtgcggcaacatcgccacaggtatacttgggaaatcgataatgtttacatccagtgtcaggtttgtcattttgcctccctgcgaaattattcccgggaacgcgtcccgggagcggtaacaattacggatttactttgcggatctgtttgacgtcaatttcaacagaattccagtctttatcgacttcaccctgaatctcaaccgtatctttcggcgtcaccgtcacgccgttccagcgtttgtggtcgatatcaacattgatagtaccgctggcatctttgaacacgtagagatcgtcagagatgcgttcaacgatattgccgcgcagggttacccaggtgtcgtcacgcagggattttgcgctttctacagtcgttacgctgccgttcggcccctggaatcctccggcctgactttgcgttgcgcttgggccagaaaaaccgccctgctctgctgccatcaccggtgcgctgcacagggccattactgcgattactgctgcgaattttttcatgtttattactccctttaatgtctgtttccgagcatttaacaagatagtccttaacaacttcttaagggaaaaaaataaaatttagtgctgtacagagcgcgttacaacacggtttactggcagcaaatacggttatcgcagggatgaaaaaatgcgaattttactgatagaagatgacatgctgattggcgacggcatcaaaacgggccttagtaaaatgggttttagcgtcgactggtttacacaaggtcgtcagggaaaagaggcgctttatagcgcaccttatgatgcggtgatcctggatttaaccttaccaggcatggatggtcgcgatattttgcgcgaatggcgagaaaaaggtcagcgtgagccggtactgatcctgaccgcgcgcgatgcgctggcggaacgtgtagaagggctgcgtctgggagctgacgattatctgtgtaaaccttttgcgttgatagaagtcgccgccaggctggaagctctgatgcgccgaaccaacggccaggccagcaacgagctgcgccacggtaacgtcatgctcgaccccggcaaacgtatcgccacgctggctggcgaacccttaacactgaaaccaaaagaatttgccctgctggaattactgatgcgtaacgctggtcgggtactgagccgcaaactgattgaagagaaactgtatacctgggacgaagaggtcaccagtaatgccgttgaagtgcatgtgcatcatctgcgacgcaaactcggtagtgattttattcgtaccgtgcatggtattggttacacattaggtgagaaatgaaatttacccaacgtcttagtctgcgcgtcaggctgacgctaatctttttaattctggccagcgtgacctggctgctttccagctttgtcgcctggaaacaaacaacggataacgtcgatgaattgttcgacacccaactgatgctgtttgccaagcggttaagtacgctcgatctcaacgaaatcaacgcggcggatcgcatggcacagacgccaaatagattaaaacacggtcatgttgatgacgatgcgctgacctttgccatctttacccacgacggcagaatggtccttaatgatggcgataacggagaagatattccctatagctatcaacgggaaggttttgctgacgggcaactggtcggtgaagacgatccttggcgttttgtctggatgaccagtcctgatggcaaatatcgcatcgttgttggccaggaatgggaataccgtgaagacatggcgctggcgattgttgccgggcaattgatcccgtggctggtcgcactgccgattatgttaatcatcatgatggtactactgggtcgtgaactcgcgccgctgaacaaactggcgctggcactacgtatgcgtgaccctgacagcgaaaaaccactaaacgcgactggcgtacccagcgaagtgcggccactggttgagagcctaaatcaactgttcgcccgcacacatgcgatgatggttcgtgaacgacgctttacctccgacgcagctcacgaacttcgtagcccgttaacggcgctgaaagtgcaaaccgaagttgcgcagctctctgacgatgatccgcaggcgcggaaaaaagcactgctccaattacattccgggatcgatcgcgctactcgtctggttgatcaactgctcacgctaagccggctggacagtctggataaccttcaggacgtcgcggagatcccgcttgaagatctcctgcaaagcagcgtgatggatatttaccacacggcgcagcaggcgaaaattgacgtgcgactgacactcaatgcccacagcatcaaacgcaccgggcaaccgctattgctaagtttgttggtgcgaaatttgctggataacgccgtgcgctacagtccacagggcagcgtggtagacgtcacgctgaatgctgataatttcatcgtgagggataacggccccggtgtgacaccagaggcactggcgcgaattggcgaacgcttctatcgcccacccggacaaaccgctaccggcagcgggcttgggctaagcattgtccagcgaatcgccaaattgcatggcatgaatgttgaatttgggaatgcggaacaaggtggatttgaggcgaaggtaagctggtaacttctctgtctatgagagccgttaaaacgactctcatagattttattaatagcaaaatataaaccgtccccaaaaaagccaccaaccacaaaccagacaaataccgaggctgaatacatatacccaaaactcgaacatttcccgcataaagagttttcttaagataagaataataagtggcgtaagaagaaaaaatgctgcaatcattgcttgcaatatacgatcttcgccactaacggaaggtatactgcaaatatttcctccgctctcaagcatccagtcatacttattgaaagcaaaaaaagaatctattaaccaataagtaagcattatatatagcaatgcttcaaatattgttttaattttctgctttaacatatatcagtacgctcataaaaatccatttataattatcaacatgacacgttgatactttcatcttttacttattcaaagccatattttcaatccccaaaaaaaccgaaccaaacgtgtaaattattccggtgcgagtaagaattatgaggaatggctatcagtattgtcattttcagaaaatatttatcctgcatcggtgagtcagagtaagatcagacttttgctaaattcgcaaaagactttgcacattttgctaatttcaccgtaccgctctgtgacgtactatagtcggcaaacgtctcaccttgaggttaaaaaatgagcaacatcctgattatcaacggcgcgaaaaaattcgcccactccaatggtcaactgaacgacaccctgaccgaagtcgcggatggcacactgcgcgaccttgggcatgatgtccgcatcgttcgcgccgacagcgactacgatgtcaaagcggaagtacaaaactttctctgggctgatgtggtgatctggcagatgccaggctggtggatgggcgcgccgtggacagtgaaaaaatacattgatgatgtattcaccgaaggtcacgggacgctgtatgccagcgatggtcgtacccgcaaagatccgagcaaaaaatacggttccggcggcctggtacagggcaaaaaatatatgctttctctgacctggaacgcaccaatggaagccttcaccgaaaaagatcagttcttccacggcgttggcgttgacggtgtgtatctgccgttccataaagcaaaccaattcctcggtatggaaccgctgccgacatttatcgctaatgacgtgataaaaatgcctgatgttccccgctatactgaagaatatcgcaagcatcttgtggaaatttttggttaactagagctcaggctttagaaggagttaaccatgcttaccgtaatcgcagaaatccgtactcgtcctggtcaacatcaccgtcaggcggtattggatcagtttgctaaaatcgttccaaccgtactgaaagaagaaggttgccacggctatgcgccaatggtggattgcgcagctggcgtgagtttccagtctatggcaccggattctatcgtgatgattgagcagtgggaaagcatcgcgcatcttgaagcgcatctgcaaaccccgcacatgaaggcgtatagcgaagccgtaaaaggtgacgtgctggagatgaatatccgtattctgcagccagggatttaatcctgccttgtttgcccggccatcctgaccgggcaatgttctttcctttaaacctcaatctccgccatgtcgcctttctcttgcaaccagttgcggcgatcttcgctgcgtttcttcgccagcagcatatccatcatcgcgtcagtacgctgatcgtcttcatcatcgatagtcaactgcaccagacggcgagtgttcggatcaagcgtggtttcgcgcaattgcatcgggttcatttcccccagacctttaaaacgctggacgttcggcttgcctttcttgcgttttaattgctcaagtacgccctctttctcttcttccgtcagcgcgtaataaacctctttcccgagatcaatacggtagagcggtggcagtgcgacgtaaacgtgaccgtgtttcaccaacgcgcggaaatgttttacgaacaaagcgcagagcagcgtggcaatgtgcagaccatcagagtccgcatccgcgaggatacagattttgccataacgaagctggctcagatcgtcgctgtcaggatcgataccgatcgctacgctaatatcgtgcacttcctggctagccagcacttcgtcggaagagacttcccaggtgttaaggatcttacctttcagtggcatgatcgcctgatattcgcgatcgcgcgcctgcttggcagatccgcctgcggagtcaccttccacaaggaacagctcggtacggttaaggtcctgcgcggtacaatcagccagtttgccaggcaacgccgggccgctggtcagctttttacgcaccacttttttggccgcacgcatacggcgctgggcgctggaaatcgccatctccgccagcagttcagccgcctgaacgttctggttcagccacaggataaaggcatctttcaccacgccagaaacgaatgccgcgcattgacggctagagagacgctctttcgtctgcccggcaaactgcggatcctgcatttttacactcagcacataggcgcagcgatcccagatatcttccgcgctcagctttacaccgcgcggcagaatattgcggtattcacagaactcacgcatcgcgtccaacaggccctgacgcagaccattaacatgggtaccgccctgcatcgttgggataaggttgacgtagctttcggtcagcagttcaccgccttccggcagccacagtagcgcccagtccacagcttcagtatcaccagcgaaattaccgataaacggtttttccggcagcgtcggcagaccatttaccgcttccgccaggtaatcattcagaccgtcctgatagcaccagcgttgttcggtattgttgatctcatctttaaaagtgatctcaacgccagggcacaataccgctttggctttcagcacatgcgtcaggcgactaacagaaaatcgcgggctgtcaaagaaggtttcatccggccagaagtgcacactggtaccagtattgcgtttaccgcaagtgccgacaacctgtaaatcctgcaccttttcgccattttcaaaggcgatgttataaacctgaccatcgcggcgcacgttaacttctacgcgcttgctcagggcgttaaccacgctaatccccacgccatgcaggccgccagagaactggtaatttttgttagagaatttaccgcctgcatgcagacggcaaagaatcagttcaaccgccggtacaccctcttccgggtgaatatccaccggcatcccgcgcccatcgtcaataacttctaagctctggtcagcatgtaaaataacgtccacgcgttttgcgtgacccgccagtgcttcatccacactgttatcaatgacttcttgccccaaatggttagggcgagtggtatcggtatacatccccggacggcggcgaaccggctcaagcccggtgagtacctcaatggcatcagcgttataagtttgcgtcatggtttaagttagtaattcgagttgatcgtcagagatggtgcagaccaagaaaatcgacgatcgggttgaaataatcttcgaagcccgtgaatgcgtggttgccgccttctatgacagtctggcggcaggaagcgtagtacgccaccgcctggcggtaatccagcacttcatctcccgtctgttgcagcagccagatcaaatccggcgcttccagcgggtcaatctgcatgactttaagatcgtaaatatggcgactctctagcacatattgctgcccggtgtaggggttctcgttctgaccgagatagtccgtcagcagttcaaacgggcgcaccgccgggtttaccaccactgcgggcagcataaaacattgactcaaccaggtggcgtaatatccccccagactgctaccgacaatacccaggctatcaccgccatgttccaggacaatggattccagcagctctgccgcgtcggaaggatacggcggcaactgcggaatgatcatctcaacgtcagggtgatgttccgccagccagttttttaacaagctcgcttttgcagagcgcgggctgctgttgaaaccgtgtaaataaagaagcgtagacatcagtagccttcactagcggtatcaggttggaaacgtgtgtccgccaggcgatgcacctcggtggtcagcgtgccatcagcatgtaactcgagagtacgccagccgggcgcgatggtatccagcgtaaagttggaacagtgcggcttaaactgcacacaggtgctcggcgttgccagcaggcggcgaccattccagtcgagatccagctcctgatgaatatgaccgcacagcaagtatttgacgtgcggaaacttcgccagcacggtatccagttcgcccgcgttacgcagactgtgttgatcgagccaactacaacccgcaggtagcggatgatgatgcagcagcagcaacgtatggcgttctggcgcatcggccagtttacgttccagccactcaagctgaaactcgctcagctcaccgtgcggcacgccaaacacctggctatccagcaacaggatttgccattgctcaccaataaacacgcgcttcgccggggagatacccgcatcctgtaacgcgctgtacatcgcgggctggaaatcgtggttgcccggcagccagacgcagggcgcacgaaaacttgcgatgccttcagcgaaatgctgataggccgcagaggattgatcctgcgctaaatcacctgtcgcgacaatcaggtcgaattcgtgctggtgtggccgaatcgcctccagcaccgcctggtaactctcccaggtgtttacccctaacagggcttcgtgcttttgtgcaaacaggtgagtgtcggtaatttgtaaaatcctgactctggcctcaccagccagaggaagggttaacaggctttccaaatggtgtccttaggtttcacgacgttaataaaccggaatcgccatcgctccatgtgctaaacagtatcgcaaccagtccgctaaaaactgattaatttgatgcttttcgtcgcgttgatgcaactttttattaggataatcataccgcgctttgaagcgaaaaatctgctggctactacacacttcagccaccatcgcgtcatgatacagacgcaccgtcatactcggaaggctccagtaactgatcgcgggcgcagtctgttctattgtcaccagggtagtgtatcgggtgctttccacaatcgtcagccgatattgtgcgtttgccacctgatagcttacagtttcgccgggtgcgtcattgcgcggtaacaaacggcgcaattgactaaagttcatctcgcacaggcgcatcatttcaggaaagtcaggtgtgtaacgcttcatttatgcccactcattttttaacgcttgatgatgcagctgcagccattgcaaagcgatgacgctcgctgcgttgtcgattttcccctcttctacccactggtatgcctgttcccggcttaccacatgaacgcgaatatcttcgttttcatcagccagaccgtgaataccgcttgcggtcgtggcgtccacttcgcccaccataatactgctacgctcactggtgccccccgggcttgccaggaaacttaacaccggtttggtccgtttgactatcagtcccgcctcttcaatcgcttcgcgacgggcaacatcttccacactttcaccctcttcaatcatcccggcaaccatctccagtagccaaggggtttcgctggtgtcgtacgcggcaatccgaatctgctcaatcagcacaacttcatcacgcactgggtcaaagggtagcaagactgcggcgtgaccgcgctcaaaaatttcccgccgcacctcatgactcatttgcccgttgaatagacgatgacgaaatctataaagatctaaactaaaaaagccgcgataaagtgtttctcgtgcaataatttctacatcgtttttgccaaatgtaacgggcaggttgtctggcttaagcattgttaatgtcctggcactaatagtgaattaaatgtgaatttcagcgacgtttgactgccgtttgagcagtcatgtgttaaattgaggcacattaacgccctatggcacgtaacgccaaccttttgcggtagcggcttctgctagaatccgcaataattttacagtttgatcgcgctaaatactgcttcaccacaaggaatgcaaatgaagaaattgctccccattcttatcggcctgagcctttctgggttcagtagcttgagccaggccgagaacctgatgcaagtttatcagcaagcacgccttagtaacccggaattgcgtaagtctgccgccgatcgtgatgctgcctttgaaaaaattaatgaagcgcgcagtccattactgccacagctaggtttaggtgcagattacacctatagcaacggctaccgcgacgcgaacggcatcaactctaacgcgaccagtgcgtccttgcagttaactcaatccatttttgatatgagcaaatggcgtgcgttaacgctgcaggaaaaagcagcagggattcaggacgtcacgtatcagaccgatcagcaaaccttgatcctcaacaccgcgaccgcttatttcaacgtgttgaatgctattgacgttctttcctatacacaggcacaaaaagaagcgatctaccgtcaattagatcaaaccacccaacgttttaacgtgggcctggtagcgatcaccgacgtgcagaacgcccgcgcacagtacgataccgtgctggcgaacgaagtgaccgcacgtaataaccttgataacgcggtagagcagctgcgccagatcaccggtaactactatccggaactggctgcgctgaatgtcgaaaactttaaaaccgacaaaccacagccggttaacgcgctgctgaaagaagccgaaaaacgcaacctgagcctgttacaggcacgcttgagccaggacctggcgcgcgagcaaattcgccaggcgcaggatggtcacttaccgactctggatttaacggcttctaccgggatttctgacacctcttatagcggtagcaaaacccgtggtgccgctggtacccagtatgacgatagcaatatgggccagaacaaagttggcctgagcttcagcctgccgatttatcagggcggaatggttaacagccaggtgaaacaggcacagtacaactttgtcggtgccagcgagcaactggaaagtgcccatcgtagcgtcgtgcagaccgtgcgttcctccttcaacaacattaatgcatctatcagtagcattaacgcctacaaacaagccgtagtttccgctcaaagcagtttagacgcgatggaagcgggctacagcgtcggtacgcgtaccattgttgatgtgttggatgcgaccaccacgttgtacaacgccaagcaagagctggcgaatgcgcgttataactacctgattaatcagctgaatattaagagtgctctgggtacgttgaacgagcaggatctgctggcactgaacaatgcgctgagcaaaccggtttccactaatccggaaaacgttgcaccgcaaacgccggaacagaatgctattgctgatggttatgcgcctgatagcccggcaccagtcgttcagcaaacatccgcacgcactaccaccagtaacggtcataaccctttccgtaactgatgacgacgacggggcttcggccccgtctgaacgtaaggcaacgtaaagatacgggttatctgccgcattcttcccccttcagccttcaatttcgaccagccatcctctattctgatgggtatttaccactggtcccggaagacaaaaatgaaacggacaaaatccatacgccacgcatcgttccgcaaaaactggagcgcacgccatctgacaccagtcgctctcgcggttgccactgtttttatgctggctggctgtgaaaagagtgatgaaacagtgtctctctatcaaaatgctgacgactgtagtgctgcaaacccaggcaaaagcgccgaatgtaccaccgcgtacaacaatgcgctgaaagaagccgaacgtactgcgccgaaatacgccacccgtgaagactgtgttgctgaatttggtgaaggtcagtgccagcaggcaccagcccaggctggcatggcaccagaaaaccaggcgcaggcccagcaatccagcgggagtttctggatgccgctgatggccggttacatgatggggcgtctgatgggcggcggcgcgggatttgcacagcagccgctgttctccagcaaaaacccagccagtccggcttacggtaaatataccgacgcgacgggtaaaaactatggcgcagcccagccaggccgcaccatgaccgtaccgaagacggcaatggcaccaaaaccggcgaccaccactaccgttacccgtggcggttttggtgaatctgttgccaaacaaagcactatgcagcgtagtgcaaccggtacctcttctcgtagtatgggtggctgataccgatggaaagagtcagtattaccgagcgcccggactggcgtgagaaagcccacgaatacggtttcaattttcacaccatgtacggcgagccgtactggtgtgaagatgcttactacaagttgaccctcgcccaggttgaaaagctggaagaagtcaccgccgaactgcaccagatgtgcctgaaagtggtggaaaaagtgatcgccagcgatgagctgatgaccaaattccgcattccaaaacacacctggagttttgtgcgccagagttggctgacgcaccagccaagcctttatagccgtcttgatctggcgtgggatggcactggtgaacctaaacttctggaaaataacgccgatacgccaacgagtctatacgaggcggcgttctttcagtggatctggctggaagatcagcttaacgccggtaacttgccggagggcagcgaccagtttaacagtctgcaagaaaaactgatcgatcgcttcgttgagctgcgtgaacagtatggcttccagttgctgcatctcacctgctgtcgcgacacggtggaagatcgcggaaccattcagtatttgcaggactgcgcaacggaagctgaaattgctactgagttcctctacatcgatgatatcgggttaggtgaaaaaggtcagttcacggatttacaggatcaggtaatttccaacctgttcaaactgtatccgtgggaatttatgttgcgtgagatgttcagtaccaagctggaggatgcaggcgtacgctggctggaaccggcgtggaagagcattatctccaacaaggcacttctaccgctactgtgggagatgttcccgaatcacccgaacctgctgcccgcttattttgcggaagatgatcatccgcaaatggaaaaatatgtggttaaaccgatcttctcccgtgaaggcgcaaacgtgagcatcattgagaacggcaaaaccattgaagcagcggaaggtccgtatggcgaagaagggatgattgttcagcaattccacccgttaccgaaattcggcgacagctatatgctgattggtagctggctggtgaacgatcaacccgccggaattggcattcgtgaagaccgtgcattgatcacccaggatatgtctcggttttatccacatatttttgttgaataagccacgataccggatggcactcgccatccggtaattgttagcctatctgcacgctcagcatactcaggctgcccatttctataccctcaaccggaatggtaattggctcctgcccatcccacgcacctaacacatacaacaacggcaaataatgctctggcgttgggttgcttaacgtgccaccttcatggtcgaggtaattcaccagaggatgttgttccactggcccttgccacgtcagattcgctttcacatactcattaaagctcgtcgcccacggatacggactactatcaccgtgccacttcactgtgcgcaggttatgcaccacgttaccgctggcgaccaacattattccttcatctcgcagcgctgccagtttgcgccccatttcgaaatgccaggcggcaggtttgctactgtcgatactcaactgcaccatcgggatatcagcgtcaggatacatcttaatcagcacgccccagctgccgtggtcaaagccccaggcttctttatccagcgtcaccgggatcggcgctaacagctcaaccagacgctgtgccagcgcagggctacccggagcaggataatgcgtatcgtacagcgcctgcgggaagccaccaaagtcatgaatcgtgggcggcgtctccatcgcggtcactcctgttccacgggtaaaccagtgagcgctaaccaccacaatcgcttgcgggcgtggcaatgtcatccccaacttctgccagctgcgggtatacaaattatcttccagcacgttcatcggactaccgtgacctaaaaacaatgctggcatacgtgtactagacatgatgatatccttaactaaaggtgtcattttgatatcctcacaatacgcttgttcggcggagtaagaacccggataacaatgatgatgatcatcagttattttgacgatctgcctgaaggtgaagatttataaggagttgtcgatgagtgtacctctcattctgaccatactggcgggggcagccacgtttattggcgcgtttctcggcgttctcgggcaaaaacccagcaaccgcttactggcgtttagcctaggttttgcggcggggatcatgttgctcatcagtttaatggaaatgcttcctgccgcactagcagctgaaggaatgagccctgtgttgggttatggaatgtttatcttcggtctgcttggctattttggcctggaccgcatgttgccacatgctcatccgcaggatttaatgcaaaaaagcgtgcagccgttgccaaaaagcatcaagcgcacagccattctgctcactctcggcatcagtctgcataacttcccggaagggattgccacctttgtcacggcgagcagcaacctggagctgggatttggcatcgcactggccgtcgcgttgcacaatatccctgaaggtctggcagtggcaggcccggtttatgcggcaacggggtctaaacgcaccgcgattctgtgggcggggatttctggactagcagaaattcttggtggtgtgctggcgtggttaatcctcggtagcatgatttccccggtggtcatggcggcaatcatggcggcggttgcaggaattatggtggcgctcagcgttgatgaattaatgccgctcgccaaagagattgaccctaataataaccccagctatggcgtactatgtggaatgagtgtgatgggattcagtttagtgctgctacaaacggcgggaattggttaaaaacaacatcagaagttgtccagcgcatggacaacttctgccagcttcacgaaagccttattctaccttttcggctgtctcttctctcgtactgtttaagtatttgttccgcgcttcaagcagtgcgtctctgtcctggcgaaacgcccgacaataacgtttcaaatgcaggaaataacccaccacaaccagagcaatcaatacaatccagtaccaggcgataaacatccttttacccttaatatttaacaatactaaacatttagcgtataaatttcacatatcctttttcggatatattcatatggtcgcataataacggaacaattatatgattttgatcataatgaaaaagaatgcctgatattaatgaaattttctcatagaaagagaagcggaattaacatcttgcatagcagggaaaaataaaaaccgaagcctgctacaacttcggtttcttgattaaggcagtaaattaagcagcggttttcagctggctttacgctcatgtgcctgacggtatgccaccaggtcttcaatagtcacgagcgccatattgtgtttattggcaaactcaatacactctggtgcacgcgccatcgtgccatcgtcattagtcagctcacacagtacaccagccggtttaaagcctgccagcgtcatcagatcaatagttgcttcagtatgaccgccacgcgtcagtacaccacctgcctgagcgcgaagtgggaaaacgtggccaggacgattcagatcactcggttttgcgccatcggcaatcgctgcgcgaacggtcgtaatacggtcagcggcagaaacaccggtagtcacaccttcagctgcttcaatggtcacggtaaaaccggtgccataggcgctggtgttattttctaccatcattggcagatcgagttgtttacggcgatcttcagtaatgcacaggcaaacaataccgctaccgtggcgaatggtcagcgccatctgctcaacagtcatggtttctgccgggaagatcatatcaccttcgttttcacggtcttcatcatcaagcaccattacaccgcgtccttcacgcagcgcagccagtgcattttcaacacgttcgaaaggcgtaccaaaagaggaaagtagcgtctgattcatggtaaaaaaacctcactaaaattatggttaccagaatcagggcagtcttaggagtggcggcatatagccaaaataacgtgagcgggtccatgcccgacagaatcgttactctctcccatccggactctaaccgtcggccccggaattacaccggatctgctgtcctttgagttcgcacccaaagcgctcgcgggctttcaactgagttgatttaccgccggtggggaatttcgccccgccctgagaataagcggattcactataacgctaatgattagcggcagcaacgcatagcttcacataattctggtttatatctaatacaaacactaaaacgggccatcaggcccgttatatcagtgctctaactccagctctcttgcctgcatcatctgttgacaataccaggcataacgtgcgcaaaaccaggttctatgttcttcatccatgttaccagtaacggccagaatatcgaccgggcgaccttctgcgtgcattctggcaaaactacgcgccaggaaatcgaaattatttaaagaattaagactatgatccataagcacatcctccggttatcgcataccttttaaggccatatgctttttctgatttcagtattccccaatcagtgtagtgcctttaaacataacgtgcgtaaatatattgtccccgatcacactttttagtgaaaaataaaaaaccatattaaaagactttctcttccagaacttctctaacctgtgttattattaacacagataaatgtaagcaaggaaactattacaaagtaaatattgcgtcactaaatggacattggagtgatatatgattttattcgccgactataacaccccttatcttttcgctatttcctttgtactgttgatcggcctgttagaaatttttgcgcttatctgcggtcacatgctctccggtgctcttgatgcacatcttgaccattatgattctataaccacaggtcatattagccaggcacttcattatctcaatattggaagattgccagctctcgtcgttctctgcttactggctggtttttttggtcttattggcatcctgttgcagcatgcctgcatcatggtctggcaaagtccactgagcaacctgttcgtggttcctgtcagtttactgtttacgattattgcggtgcattataccggtaaaatagttgcgccctggattccacgcgaccatagtagtgctattacagaagaagaatatattggtagcatggcgttaattaccggtcatcaagccactagtggtaatccctgcgaaggaaaactcaccgatcaatttggccaaatacattatttactactggagcctgaagaaggaaaaattttcactaaaggagacaaagtgttaattatttgccgactttctgcaacgcgatatttggcggaaaataatccctggccccaaatattgtaatttattaatcaaaaggaaatttaataatggatgatattgttaattctgtgccctcctggatgtttaccgcaattattgccgtatgcattctgtttattattggaattattttcgccaggctctatcgtcgcgctagcgcagagcaagcttttgttcgtactggtttaggtgggcaaaaagtggtaatgagcggtggcgcaatcgtgatgccgatctttcatgaaataatccccatcaatatgaatactctgaagctggaagtcagccgcagtaccattgatagcctgattacgaaagatcgtatgcgcgtcgatgtagtagtcgctttctttgtgcgggtaaaacctagtgtagaagggattgccaccgctgcccagacgctggggcaacgcaccctgagccctgaagacttacgtatgttggttgaagataaatttgtcgatgccctccgtgcaacagctgcgcaaatgaccatgcatgagttacaggatacccgcgagaactttgtgcagggggtgcaaaatacagtggcagaagacctgagcaaaaacggtctggaactggagagcgttagtcttaccaactttaaccagaccagcaaagaacatttcaatccgaacaatgcctttgacgccgaaggtttaaccaaactgactcaggaaacagagcgccgtcgccgcgaacgtaacgaagttgaacaggatgtagaagttgcggtgcgtgaaaaaaatcgcgatgcgctaagccgcaagctggagattgaacagcaagaagcgtttatgacgcttgagcaggagcagcaggttaaaacccgtactgccgaacagaatgcacgtattgcggcttttgaagctgaacgtcgtcgtgaagcagagcagacacgaattctggctgaacgacagattcaggaaacagaaatcgaccgcgaacaggccgtccgcagtagaaaggttgaagctgaacgtgaagttcgcattaaagagatcgaacagcagcaggtcaccgaaatcgctaaccagacgaaaagcatcgctattgccgccaaaagcgaacaacagtcccaggcagaagcgcgtgctaatctcgcacttgcagaagcggtaagcgcccaacaaaacgtagaaaccactcgccagactgccgaagccgatcgtgctaaacaagttgccctaatcgctgccgcgcaggatgcagaaaccaaagcggttgaactgaccgtgcgggcgaaagcagaaaaagaagccgcagagatgcaggcggcggctatcgttgagttagccgaagctacacgtaaaaagggtctggcggaagcagaagcacaacgtgcgctgaacgatgctatcaacgtactttctgatgaacaaaccagccttaaattcaaactggccttgttgcaggcgctgcctgcggtaatagagaaatccgttgagccgatgaagagtatcgacggtatcaagattattcaggtcgatggtctgaatcgtggcggcgctgcgggtgatgcaaacacgggtaatgtggggggcggaaacctggcggaacaagcattaagtgccgctctctcttaccgcacacaggcaccgctgattgactccttgctcaatgaaattggcgttagtggcggcagtctggcggcattgactagtcccttaaccagtacaactcccgtcgaagaaaaagcagagtaaaccctcttccaggaataatccctggcccaaaaagccggggattttttatatctgcgttccgctaaaaagtgcaaatgatcaggttgttgcagcattttgcgtgacggctcggggaaggcaaaactgcatcagagaaagcattgcgtggggtctggcgctcatcaacaatcggggagtcagcagggggctgaaacgggaaagcccctcccgaagaagggggccttacagaaggaaagggttatgatgaagctcgtcatcatactgattgtgttgttactcgtaagtttcgcagcttattaacagccaatcagaggggggagaaatcctccctcacccttgttcctttactttaggttgaaaaaaaatcagcgtcaagaaggtttcattaacacatatccctggcccaaaaagccggggattttttatatctgcgttccgctaaaaggtgcaaatgctcaggacgttgcagcgttttgcgtgaccgctcggggaaggcaaaattgcctctgggaaagcattgcgcggggtccggcgctcatcaacaatcggggggcagcaaggggctgaaacgggaaagcccctcccgaagaaggggccttgtataaggaaagggttatgatgaagctcgtcatcatactggttgtgttgttactgttaagtttcccgacttactaacaactcatcagaggggggagaaatcctcccttacccttgttcctttactctaggttgaaaaaacaacagcgtcaataggcctgccatgtacgaagcgagatctgtgaaccgctttccggttagccttttttatcctgttggatcttcttgatgatgttggtcgtgctgcaaccgtcttcaaagttgagcaccaacacttcgccaccgttggcccagacttctttactcccggcaatctcttctggtttatagtcgccgcctttcaccagcagatctggcaagatcccggcgatcaagcgctgcggcgtgtcctcttcaaagctcactacccagtcgaccgcttccagtgcgcccagcacaatcatacgctgttcgagtgggtttaccgggcgggaatcccctttcagccgtttggtggaggcatcgctgttgacggcaacaatcaagcggtcacccagcttgcgggcatttgccagataagagacgtgcccggcgtgcaggatgtcaaagacaccgttggtcatcaccactttttcaccacgtttacgcgctgccgctacggccagcttcagttcctcttcggtcatcacgccaaagcctgtatctgcacgtccacgtacagcattttccagctcgatcgggctaaccgtggaggttcccagtttgccgaccaccacgccagccgccgcattggcaaagaagcaggcttcttccaggctattacccgctgccagcgttgccgccaggacgccaatcaccgtgtcgcccgcaccggtaacgtcatacacttcctgcgcttgggttggcatatgcagcggcgctttacccggttgcagcaggctcataccctgttcggaacgggtcactaacagagcgctgagttcgtaatcggcaatcagtttcatgccgcgctcaacaatctcttcttcggtcttacatttaccgacaacagcttcaaattcgctgagattcggcgttaacagcgtagcgccgcggtagcgctcaaaatcggtaccttttggatcaatcagcaccggaacacccgctttacgcgccagttggatcatctgctgtacgcttgccagcgcacctttggcgtagtcagaaagcaccagcgcgccaatgctactcagcgcctgattaatccgctcgtgcagcggctgcggatcaacaccttcgaaaccttcttcaaaatccagacggatcagctgttggttgcgggaaagtacccgtaatttggtaatggtcggatgcgtcggtacagaaacgaagtcgcatttgacgttgacgtcggccagagatttactcagcgcgcgcgctgcatcgtcaatgcccgtcaacccgaccaggcgtgcattagcaccgagagaagcgatattcatcgccacgttagccgcgccgcccggacgttcttcgatggtattcactttaaccacgggcaccggcgcttccgggctgatacgactggtggggccgtaccagtaacgatccagcatcacatcaccaaccaccatcactcctgcacgttcaaactctggcagcgttactttcattcctgtctcctgagagattcaaaatttgcgcgcgataataccatacttcattcttccaccagccacttctgccagcttgcccgcaccagttcacgctctgcggtgaagcaatcctcgctcacatggcccggcaattcctgtaatgccagatgatgaagttcatcgcgaagcgtagtgtaagcacgggtcagcgccatcgcttcctgctcttccataatgtcgttttgcgccagtagttccagaatacgcacgttgtcactccagcgcgttaacttcggtttttcatgagcgtagcgcaacaccagatattgggtaataaattcgatatcggtaattcccccttcatcagctttgatatcaaagcgatcgcgatgtttattgccgagatgagcgcgcattttctcgcgcatttcccgcacttccgtttgcagagttttaccttcacgcggcagcgtcataatctcgcgacgcactgcgtcaaagtgcgcggtgagctgcggatcgccgtacactacacgcgcacgcaccagcgcctgatgttcccacgtccaggcctcgtttttctgataatcggcaaatgcttctgcggatgtcaccagcattcccgccgccccggacggacgcagtcgagcatccacttcatacaaaatgccggaagaggtacgcgtactgaacagatgcataatgcgttgcgccagacgcagataaaactgccgcccgtcgatttcccgctcaccgtcagtcatcgcatccattgggcaatcatggaggaagataaggtcaagatcggaactgtagcctaactcccagccgcccagcttgccgtagccgaccaccgcaaaaccacgcccttcgcgttcgttcaggtgattcggcttaccgtagcgggcaaccatttgaacccacgcctgctgaacgacggcatctatcatggcttccgccagccaggttaagtgatcgctcactttcatcaccggtagcgtaccggcgatatccgctgcggcgatgcgtaacagctgcgcctgtttgaactgacgcagcgcctcaagctgttgctcttcgtcatcttccggcacgcgcagcaaatactggcgcaactcatcgcggtaggcatcggtcgccgtcggctggtaaagggtgtttggatcgagcaattcatccagcaataatggataacgcgccagctggctggcaatcatcgggctcgcggcacacagagaaatcaaatgtttaagcgccgcggggaattcactgagcaattctaaataggtggtgcgggtaacaatccccaccagcaaggcggtaatgcggctcagcgtaacggcagcgtcttcacgcgcacagacatcacttagcagatgcggcatcagatggtcgagcacctgacgtcctcgcggcccgatggtgcgcttatccagctctttgcggaaatcggcaatcagcgttagcacctgtttgcgatcatcctcgctaagatgcgccagcactggcgtagtgtcatcttcctgcaacgcatcctgccacagctcacgccactgttcgctcaggctctcttcctgagtttcactttcatcgtcgccaatcaattcattaaacacccggcgcacattggtcatatgtgcggtcagcgccccggtcagttgcggccagtcagcaaagtccatcgcccacgccagccgcgcacgattaagctcatcagaaggaagcgtctgggtttgttcgtcgttaatgctttgcagcaggttttccagacgccgcaggaacagatacgccactcgcaattgttcagcatcgttttcagaaagcagatgcagctcggcaatggcgctgagcgttggcagtaaagagcggctttgcaggctcggttcgcgtccgccgcgaatgagctggaacacctgaacgataaattcaatttcgcgaatgccgcctgcgccgagtttgatattgtcggtcaaaccacgtcgacgcacttcacgggcaatcatccctttcatgttgcgcaggctctgaatcacgctgaaatcgatgtaacgacggaaaacaaacgggcgcagcatcgcacgcaactcgttagcatagacgccttcgctatcgcccataatccgcgccttgaccatcgcgtaacgctcccagtcgcgcccctgctcctggtaataatcttccaacgcggcaaagctcagcaccagcgggccactttcgccaaacggacgcagccgcatatccacgcgatagacgaagccatcctgcgttggttgatccagcactttaatcagccgctgccccatgcgggtaaaaaactgcgcgttatccagttcccggcgtccaccctgcgtacaaccatgttccggccaggcaaaaatcagatcgatatcagaggagaaattcagctccccaccgcccagcttacccatgcctaaaatcagcagcggttgcgcttcgccctgcgcattgcacggcgttccccactcgcggcagcaggcgtcatacagccagtcacgcgccgcaacaatcagcgtctccgccagatagctgagctgctgcaatatgctctcttcagtaaccagtgccagcgtttgcgcccaggcgatgcgcaccataatgcgccgccggaatagccgcagctcgcgcattaacccggcttcgtcactcacattacagagcgcctcctgcaaccatgccgcgtaatgctgccattcgtcggcctgcggcggttggctttccagttccgtcagccactctggatgcgcaatcacgctgtcctgcacaaaatcactaaaagtaagtacactcttcgcctgtgcgctaagactttcctcggctaaaggctctggcagccgctcaacaacggtctgccagtactgctgtaacggactagagagcggcttcataagcgattttatccttgcctgattaacgttttccgctgtgcaaccagaacggttcctgattgtttgcctcattacggaaatgttcaatttcgatgcgttgcccggtcgcaatagcgtgatgcagcccctgccagttctccagccaggcttgcgcgacgacaggatcatagtaacccgccagcaacagtatactgtcaatatcacgcgtcaggcgtggcaactggtcacggtagcgatcgcctaacggctggcagaaaacgcttttcagttcagcggcatggcgggaaagatggatatcggcaaagcgtttgaaggagtcgctgattttgccctgcgctttggcatctaaaaatggctgccatgctttgcttaccaaccattcggtcaacgccagcttcgccattgccgtttcggtagagtagaccgccgtcacggcagacaccgcagaagcaatggtcgcctcgcattgagtcagcagatcacgtaagtgagtgctcgctttacgcggcacaataccaccgaacagcatcagcgtatgacggaccaggctaatggctgccagcacctgttctttcgccgcatcgttgccgcgtacccacagttcttcatgatactgccattgcgctaacgccagctcgagcgccgcttccagcccctgttccacatcggcttttgccgcaacatgcaaaatggtggtcggtttgatttcacgcgccggattgccctgcgccagatgatagccacgcgccgctttgctcaggctgccctggcgtaatccggtttggcttaccagttggttcgccagtttcagcaccgcgcgcgtgtcgccgctaagcagttccagttccagctcacagataggttcagcaaattcacccgctttcacttccccctggtcgagggcgatttcaatttggctaccatcgaccgccaccagccatttttcgcgataaaaatcggtgctgaacagcggctgcacgcgggaggcgagatcggcgggcaattcgccgttcggccagacttccgtcggtaactgcgccaggtcgagcgtcggttcgctcaacgccacgttatattccgggcgctgatgtaagccgcctgtcactcttcctgcaactttcatggtcatctcatagcgaccgttttcgccacgaatacgtaagcccatatcgtgcccacgcagccagttatccggcgtttcgtagtaaatattcagcaactgcacggggtcatggtgctcgccgcccagcgtattgagatggtcacgcaacgcctcaacggcactgtgattaacaataaactttaattcgatttcctgagccatggcctttacttatcggttatgtcacataagtgacgatgaacggcgaacttaatgcgatcttttttgtcagtagatagtattttgcgccaaattgccatgcaacgggcaatttgacgggcgtaaaagtttgaagcagtggcaagacctgacacagaggattccgattgatgtcgaatgctttgcgtagcgacactgatgccactactatcgttccactttccatgacaataacgacagcctgatgccaaaattacgcctgatcggattaactttactcgcacttagcgcgactgccgtcagtcacgctgaagaaacgcgctatgtttccgacgaactgaatacctgggtccgcagcggtccgggagatcattatcgcctcgtgggcacggttaacgccggcgaggaagtgaccttattacaaactgacgccaacaccaattatgcccaggtgaaagacagctctggccgtaccgcctggatcccgttgaaacaacttagcactgagccaagcctgcgctcccgtgtgccagatctggaaaatcaggtcaaaaccctgaccgataaactcaccaatatcgataacacctggaatcagcgcaccgcagaaatgcagcaaaaagtggcgcagagcgacagcgtgatcaacgggttaaaagaagaaaatcagaaactgaaaaacgagctgattgtcgcgcagaaaaaggtcgatgccgccagcgtacagctggatgacaaacagcgcaccatcatcatgcaatggtttatgtatggcggtggcgtgctggggcttggcttgctgctcggtctggtactgccgcacctgatcccaagccgcaaacgcaaagatcgctggatgaactaaatcgccttcttcgttgcactgtcttattattaggaattgtgtatttgacgaagggatgatggcgtgaagatttatctggtcggtggtgctgttcgggatgcattgttagggctaccggtcaaagacagagattgggtggtggtcggcagtacgccacaggagatgctcgacgcgggctaccagcaggtaggccgcgattttcctgtgtttctgcatccgcaaacgcatgaagagtatgcgctggcacgtaccgaacggaaatccggttccggttacaccggttttacttgctatgccgcaccggatgtcacgctggaagatgatcttaagcgtcgcgatctgaccattaatgcgctggcccaggacgataacggcgagattatcgacccgtacaacggtctgggcgatctgcaaaatcgtctgttgcgccatgtttcccccgcttttggcgaagatccgttacgcgtattgcgcgtggcgcgttttgctgcgcgttatgcccacctcggttttcgtattgccgatgaaactctggcgttgatgcgcgagatgacccatgcgggtgaactggaacacctgacgcctgaacgggtatggaaagagacggaaagcgccctcaccacccgcaatccacaggtgttcttccaggtactgcgcgattgcggcgcactgcgcgttttattcccggaaattgacgcactgtttggcgttccggcccctgccaagtggcatccggaaatcgatacgggtattcataccttaatgacgctcagtatggcggcgatgctgagtccgcaggtcgatgtccgtttcgcaactttatgccacgatctcggtaaagggctgacgccgccagaactctggccgcgtcatcatggtcatggcccggcgggtgttaagttagtggaacaactatgccagcgtctgcgcgtgccaaatgaaattcgcgatttagccagactggtggctgagtttcacgatctcatccacaccttcccaatgctgaacccaaaaaccatcgtcaaattatttgattccatcgatgcctggcgtaaaccgcagcgtgtcgagcaactggcgctgaccagcgaggctgacgtgcgcggcagaaccggttttgaaagtgcggactacccgcaaggccgctggttgcgcgaagcctgggaagtggcgcagagtgtgccgacaaaagccgtcgttgaagcgggatttaaaggtgtggagattcgcgaggagctgacccgacggcggattgcggcggtagccagctggaaggaacaacgttgcccaaagcctgaatgagtattgggcattttgccggatgcggcgtaaacgccttatccggctacatgtcaacgacagttgtaggcctgataagacgcgcaagcgtcgcatcaggcgttgattgccggatgcggcgtgaacgccttattcggcctacgcaatcgttgacaacgccaagcatccgacactattcctcaattaaaagaacacgacatacaccgcagccgccacaataaagcgataaatggcgaacgggataaagctaatgcgcttaatcaattgcaggaaggttttaatcgctatcagcgccaccacaaaagcggtgataaacccaacggcaaacatcgggatatcgccgcttgtcaggaagccccagcttttgtagagatcgagcgccgttgcgcccatcatcatcggcaccgccagcaggaagctaaactcggaagcagcgtaacggctcacccccatcagcatcccaccactaatggtcgccccggaacgggagaaacccggccacagcgccagacactggaaacagccaatcataaatgcctgacgataggtcatatcatcaagacccggcgcacgcggctctttcggcttcaggcattcggcggcaatcagcaacaaaccgccaacgaccagcgcatacatcacatttatcgggttaaacaaactcttaatcgtgtcgtggaacaacagccccaataccaccgccggaatcatccccagcaaaatgtggatcagcgttaaacgacctttgctttcaccttcgtgctgcaacgggcggccaaagtggatgccaatcaggccaaacagacgccgccagaacatcactactaccgccagaatacttcctaactggatcacaacttcaaaggttttcgccgtgtcgccctcaaaccccaacaagtgaccgacaataatcatatggcccgtgctggataccggcagaaattctgtcaatccttcgaccacacccaatattgccgctatcagcaggctgtgcatatcgctcatcaataaacccctaaattattaaaatgtaccgcttgtccgaactactgcgtatgaccaggttataaccgtttggtttaacagctgtaaaattaattattttctttcagattattgccacgctcaatgattacgccaacattcgccgcccgcgccactgcgcctggcttgctgagtttgatacgcacccacgggctgttgaagcgtgctaacagcagctccgccacctcttcagccacgcgttccaccagcgcaaaacgcgccccctcgacgtggctgaccaccgtttctgcaatgtcagcgtaactgaggcaatccgccacatcatcacttttcgccgctttacggttatcccacgccatttcgatatcgaacactaacttctgttcgatggtctgttcccagtcgtaaacaccaatagtggtgattacgctaagttgctctataaatacaatatccatcacgtcctgcctgctttttggctaaccggataccacttccggcgaaatgtgcgtattatccacagattcatcgttgaacacgaattttcaaaacggaacagcttatgagtgcaatcgcgcctggaatgatcctcatcgcgtacctctgcggctccatttccagtgccattctggtttgccgcttgtgtgggctgcccgatccgcgaaccagcggctccggcaatccaggcgcaaccaatgtgttacgtatcggtggcaagggagcagccgtagcagtactgattttcgacgttctgaaaggaatgttgcccgtctggggcgcgtatgaattaggtgtcagccccttctggctaggcttaattgccatcgccgcctgtcttggacacatctggcccgttttcttcggatttaaaggaggaaaaggcgttgctaccgcttttggtgccatcgcacccattggctgggatctcaccggagtaatggcgggaacctggttactgaccgtgctattgagcggatacagcagcctgggagcgattgtcagtgcactgattgctccgttttatgtctggtggtttaagccacaattcaccttcccggttagcatgctctcttgcctgatcctgctgcgtcatcatgacaacatccaacgtctgtggcgtcgtcaggagacaaaaatctggacgaaattcaaaagaaagcgcgaaaaggatcccgagtgatttctggtggatttacatgacctgatagccttcatcgggcttgcccagccgttgctggcaccatgccgccagaaattccacgcagacacgtaatttcatgctgcgatagagcggctcccggtaaacagcccagatattggcgctttgtgcatactctggcaatacttgcaccagtttgccactctccagaaacggcaacacatcccactcggaacgcagcataatccctttgccctccagcgcccattgcagcacaatctcgccgctattggaggaaagatgcccgcttaccttcacgctttttttctcctgaccgttccccaactcccatattccatgggtcatatcgcgctctttggtcaccagacagtcatgacgacttaattcctgtagggattgtggctgcggatatttttgcagatactcaggtgctgcgcataatattcttttattttttgtcaaaagatgcgcaatataataatcaggaatttcgtcattaatacgaatatccagatcaatattatcctgcactaaatcaatttgccgatcgaacaattcaaaatgcacctgtaactcaggataattgcgcatcagttcggtaatagctggcgcaatatggctgcgcccaaaaccaaaactgcaaccaatacgaatcatcccctccgggcgcgttttgatttgcgtgacgtcatcgaccagtcgctgatattgggtgaggatttccaacgcatgttcgtaacaacgttggccactttcagtcagcgccacgccgcgagcggagcggttcagcagcgttgttgccagcgtattttcaaggatttggatccgcttggtgacaaatgcaggcgtctgcccaagcgtcgccgctgcggcgctaaaactcccgctgtgaacgatttctaccagtacctgcaagtctttggctaaaggccagctattcagcatcgttaattatccgcagttgtgataagcgcagtgtatttcgcaaaacattgccattccctgctctggcgcaatattcattcttattttcgcgttgattcacgaactgttaattacatattcacggtggcaaaaaatataaaaccacatttttagtggtagtttgtggcggtgaatttttccagacaaatacaaaaactggagttgccatgatgagcgaaagtaataagcaacaggcagtgaataagttgacagagattgtcgctaactttaccgccatgatttctacccgaatgcctgatgacgtggtggataaactaaaacagctaaaggatgccgaaacgagcagcatggggaaaattatctaccatacgatgttcgacaacatgcaaaaagcgattgacctgaatcgtcctgcctgtcaggacaccggggagattatgttcttcgttaaagtcggttcccgcttcccactgcttggcgagctgcaaagcatactcaaacaagccgtggaagaggcaaccgtcaaagcgccactacgtcacaatgcggtagaaatttttgacgaagtaaacaccggcaaaaataccggtagcggcgtaccgtgggtcacctgggacatcatccccgacaatgacgatgcggaaatcgaagtttacatggcaggcggcggctgcacgctacctggccgcagcaaagtgttaatgccgagtgaaggctacgaaggcgtggtgaaattcgtcttcgaaaatatctccaccctcgccgtaaacgcctgtccaccggtactggtgggcgtgggcatcgccaccagcgtggaaaccgccgccgtactcagccgtaaagccattttgcgcccgattggcagccgccatcccaatccaaaagcggcagaactggagctacgcctggaagaaggactcaaccgtctggggattggtccacaagggctgaccggcaacagtagtgtgatgggcgtacatatcgaatctgccgcccgccatccgagtaccatcggcgttgctgtctctaccggctgctgggcgcatcgtcgcggcacgctgctggttcatgccgatctcacctttgaaaatctgtctcacacccggagcgcgttatgaaaaagatcctgacaaccccgatcaaagctgaagatctgcaagatattcgcgtcggcgatgtgatctacctgaccggtacgctggtgacctgccgcgacgtttgtcaccgccgtttgatcgaactgaaacgtccgatcccttacgatctcaacggcaaagcgattttccacgctggccccatcgtgcgcaaaaacggcgacaaatgggagatggtctccgtcggcccgacaaccagtatgcgtatggaaagttttgaacgtgaatttattgagcagaccggcgtgaaactggtggttggcaaaggtggtatggggccgctgaccgaagaaggctgccagaaattcaaggcgctacatgtgattttcccggcaggctgcgcggtgctggcggcaacccaggtggaagagattgaagaagtgcactggacagagctcggaatgccggagagtctgtgggtctgccgggtcaaagagttcggcccgctgattgtctctattgatacccacggcaacaacctgatagccgaaaacaaaaagctgttcgccgaacgccgcgatcccatcgtggaagagatctgcgagcacgtccattacatcaaataaccctcccggagaggctcacccctctcctttttcgcaggcataacacgatgaaaccttccactgaatggtggcgatatcttgcgccgctggcggtcatcgccattattgctctacttccggttcccgcagggctggagaaccatacctggctctactttgccgtttttactggcgtgatcgttggactgatcctcgaacccgtgccgggtgccgtggtggcgatggtgggtatatccatcatcgccatactctctccctggctgctgttcagcccggagcagctcgctcagccaggctttaaattcactgcaaaatccctcagctgggccgtttccggtttttctaatagcgttatctggctgattttcgccgcctttatgtttggcacaggctatgaaaaaaccgggcttggacgccgcattgcgctgattctggtgaaaaagatgggacatcgcacgctgtttctcggctatgcggtgatgttctccgagctgatcctcgcacctgtaacaccgtccaacagcgcgcgtggtgcggggattatctatcccatcatccgtaacctgccaccgctctatcaaagtcaaccaaacgacagcagtagccgcagcattggcagctacatcatgtggatggggattgttgccgactgcgtgaccagcgccattttcttgacggcgatggcaccaaacttgctgttaattggactgatgaaaagcgcatctcacgccacgctgagttggggcgactggttcctcgggatgttgccgctcagcattttactggttctgctggttccctggctggcttacgtgctgtacccgccggtactgaagtctggcgatcaggtgccgcgctgggcagagacggaactgcaggcaatgggcccgctctgtagccgtgaaaaacggatgctggggctgatggtaggcgcgctggtgctgtggattttcggcggtgattatatcgatgccgcgatggtcggttacagcgtggtggcactgatgctgcttctgcgcattatcagttgggacgacattgtcagtaataaagcggcgtggaacgttttcttctggctggccagccttatcaccctcgccaccggactcaacaacaccggttttattagctggtttggcaaactgttagcaggcagcttaagcggttatagcccaacgatggtgatggtggcgttgattgtggtgttttatctactgcgctactttttcgccagcgccacggcgtatacctccgctctcgcaccgatgatgattgctgctgcgctggcgatgccggaaatcccgctgccggtgttctgcctgatggttggtgcggcaattggtctggggagcattcttacaccatacgccaccggccccagtccgatttactacggcagtggttatctgccaacggcggattactggcgactgggggcgatttttgggctgatattcctcgtattgctggtgattaccggcttactgtggatgcccgtggtgttgctttaagtgaggacggtgccggaaattgctctccggcacccaatagttttacgcagccggtaactccgccagcggccagcgcggacgcacgctaacgccgagatccgccgtcgcgcctgctttaaaccgcaccattccggcataggcgatcatcgcgccgttatcagtacaaaattccggacgcgcgtagaacacttcgccgcggcgttttttcatcatttcagccagcttcgcccgtaacgtacggttagcactcacgccgcccgccatgaccagtcgcttaaagcccgtctgatccagcgcccgcttgcacttaatcatcagcgtatcgaccaccgcatcttcaaaggcgcgggcgatatcagcacgcgtctggtcgtcggtgccgttgtcacgaatggtatttgccgcgaaggttttcaggccggagaagctgaaatccagccccggacggtcggtcatcggacgcgggaagacaaagcgcccggcagtaccctgagccgccattttgctcagtaacggcccgccaggataatccagccccagcagcttcgcggttttatcaaacgcttccccggcggcatcatcgatagactcgccgagcagctcgtactgaccaatgccagtcacgctgattaactgcgtatgaccgccggaaacaagcagcgcaacaaacggaaattccggcgggttatcttccagcatcggcgctaacagatgcccttccatatggtgtacagggatcgccggaacgtcccaggcaaacgccagagaacgccccacggtcgcgccaaccagtagcgcgccgactaatccagggcctgcggtataggccacagcatcaatgtcttttgccgttaaaccagactcctttagcgccgcctggatcaacggtacggttttacgcacatgatcgcgggaggccagttcaggcacgacgccgccgtagtcagcgtgcaatttcacctgactatacaattggttggctaacaaacctttttcatcgtcgtaaatggcgatgccggtttcatcgcaggaagtttcaatacccagtacacgcatgacttgttttacctcgctttattaccgcgcagtgtaggaccaatgcgggttgatgtaaaactttgttcgcccctggagaaagcctcgtgtatactcctcacccttataaaagtccctttcaaaaaaggccgcggtgctttacaaagcagcagcaattgcagtaaaattccgcaccattttgaaataagctggcgttgatgccagcggcaaaccgaattaatcaaaggtgagaggcacatgccggtaattaaagtacgtgaaaacgagccgttcgacgtagctctgcgtcgcttcaagcgttcctgcgaaaaagcaggtgttctggcggaagttcgtcgtcgtgagttctatgaaaaaccgactaccgaacgtaagcgcgctaaagcttctgcagtgaaacgtcacgcgaagaaactggctcgcgaaaacgcacgccgcactcgtctgtactaattccccgagagcgttgctctccgatcagaccgagttgtagttgtaaggccgtgcttccgaaaggaatgcgcggcttattttcgtttatgaattgctaaaaatcggggcctatggctggacgaatcccacgcgtattcattaatgatctgctggcacgcactgacatcgtcgatctgatcgatgcccgtgtgaagctgaaaaagcagggcaagaatttccacgcgtgttgtccattccacaacgagaaaaccccgtccttcaccgttaacggtgagaaacagttttaccactgctttggatgtggcgcgcacggcaacgcgatcgacttcctgatgaactacgacaagctcgagttcgtcgaaacggtcgaagagctggcagcaatgcacaatcttgaagtgccatttgaagcaggcagcggccccagccagatcgagcgccatcagaggcaaacgctttatcagttgatggacggtctgaatacgttttaccaacaatctttacaacaacctgttgccacgtctgcgcgccagtatctggaaaaacgcggattaagccacgaggttatcgctcgctttgcgattggttttgcgccccccggctgggacaacgtcctgaagcggtttggcggcaatccagaaaatcgccagagtttgattgatgcggggatgttggtcactaacgatcagggacgcagttacgatcgtttccgcgagcgggtgatgttccccattcgcgataaacgcggtcgggtgattggttttggcgggcgcgtgctgggcaacgatacccccaaatacctgaacagcccggaaacagacattttccataaaggccgccagctttacggtctttatgaagcgcagcaggataacgctgaacccaatcgtctgcttgtggtcgaaggctatatggacgtggtggcgctggcgcaatacggcattaattacgccgttgcgagcttaggtacgagtaccaccgccgatcacatacaactgttgttccgcgcgaccaacaatgtcatttgctgttatgacggcgaccgtgcaggccgcgatgccgcctggcgagcgctggaaacggcgctgccttacatgacagacggccgtcagctacgctttatgtttttgcctgatggcgaagaccctgacacgctagtacgaaaagaaggtaaagaagcgtttgaagcgcggatggagcaggcgatgccactctccgcatttctgtttaacagtctgatgccgcaagttgatctgagtacccctgacgggcgcgcacgtttgagtacgctggcactaccattgataagccaagtgccgggcgaaacgctgcgaatatatcttcgtcaggaattaggcaacaaattaggcatacttgatgacagccagcttgaacgattaatgccaaaagcggcagagagcggcgtttctcgccctgttccgcagctaaaacgcacgaccatgcgtatacttatagggttgctggtgcaaaatccagaattagcgacgttggtcccgccgcttgagaatctggatgaaaataagctccctggacttggcttattcagagaactggtcaacacttgtctctcccagccaggtctgaccaccgggcaacttttagagcactatcgtggtacaaataatgctgccacccttgaaaaactgagcatgtgggacgatatagcagataagaatattgctgagcaaaccttcaccgacagtctcaaccatatgtttgatagcctgcttgaactgcgccaggaagagttaatcgctcgtgagcgcacgcatggtttaagcaacgaagaacgcctggagctctggacattaaaccaggagctggcgaaaaagtgatttaacggcttaagtgccgaagagcgatcgggaagcccccgacagccgcactgagaggcagcggcaaatatataagtacgccctcgtaattatcgttggcggtaaacaaccgttggatttcagcgttaacggctgaaggacatcgggtcaatcgcccaacaccaacctcatgaaataagtgtggataccgtcttatggagcaaaacccgcagagtcagctgaaacttcttgtcacccgtggtaaggagcaaggctatctgacctatgccgaggtcaatgaccatctgccggaagatatcgtcgatagtgatcagatcgaagacatcatccaaatgatcaacgacatgggcattcaggtgatggaagaagcaccggatgccgatgatctgatgctggctgaaaacaccgcggacgaagatgctgccgaagccgccgcgcaggtgctttccagcgtggaatctgaaatcgggcgcacgactgacccggtacgcatgtacatgcgtgaaatgggcaccgttgaactgttgacccgcgaaggcgaaattgacatcgctaagcgtattgaagacgggatcaaccaggttcaatgctccgttgctgaatatccggaagcgatcacctatctgctggaacagtacgatcgtgttgaagcagaagaagcgcgtctgtccgatctgatcaccggctttgttgacccgaacgcagaagaagatctggcacctaccgccactcacgtcggttctgagctttcccaggaagatctggacgatgacgaagatgaagacgaagaagatggcgatgacgacagcgccgatgatgacaacagcatcgacccggaactggctcgcgaaaaatttgcggaactacgcgctcagtacgttgtaacgcgtgacaccatcaaagcgaaaggtcgcagtcacgctaccgctcaggaagagatcctgaaactgtctgaagtattcaaacagttccgcctggtgccgaagcagtttgactacctggtcaacagcatgcgcgtcatgatggaccgcgttcgtacgcaagaacgtctgatcatgaagctctgcgttgagcagtgcaaaatgccgaagaaaaacttcattaccctgtttaccggcaacgaaaccagcgatacctggttcaacgcggcaattgcgatgaacaagccgtggagcgaaaaactgcacgatgtctctgaagaagtgcatcgcgccctgcaaaaactgcagcagattgaagaagaaaccggcctgaccatcgagcaggttaaagatatcaaccgtcgtatgtccatcggtgaagcgaaagcccgccgtgcgaagaaagagatggttgaagcgaacttacgtctggttatttctatcgctaagaaatacaccaaccgtggcttgcagttccttgacctgattcaggaaggcaacatcggtctgatgaaagcggttgataaattcgaataccgccgtggttacaagttctccacctacgcaacctggtggatccgtcaggcgatcacccgctctatcgcggatcaggcgcgcaccatccgtattccggtgcatatgattgagaccatcaacaagctcaaccgtatttctcgccagatgctgcaagagatgggccgtgaaccgacgccggaagaactggctgaacgtatgctgatgccggaagacaagatccgcaaagtgctgaagatcgccaaagagccaatctccatggaaacgccgatcggtgatgatgaagatagccatctgggggatttcatcgaggataccaccctcgagctgccgctggattctgcgaccaccgaaagcctgcgtgcggcaacgcacgacgtgctggctggcctgaccgcgcgtgaagcaaaagttctgcgtatgcgtttcggtatcgatatgaacaccgactacacgctggaagaagtgggtaaacagttcgacgttacccgcgaacgtatccgtcagatcgaagcgaaggcgctgcgcaaactgcgtcacccgagccgttctgaagtgctgcgtagcttcctggacgattaatcggtaggccggatcaggcgttacgccgcacccggcactaggccctctgcacaaacgccaccttttcggtggcgttttttatcgcccacgcactaccagcgcctggtccagctcgcgatacgcttcaaccagtttctccagactaacgcgacttaaaccgctgggatttggcagcacccaaatctgcgtgctaccaatggtgagcgtttgtttcccccactgtgcaccgcgctggctgaatccctgttcatatgcttgtttgcccagaatcgccaacgcctgcggctgataatcttcaattttttcaatcagcttacgcccgcctgcgtgtagctcctgcttactaacttcattggcttgcaccgttggacggtctaccagtttggtgacgccacaacgataatccagcagatgctgtgcctcctgcggcttcaactgacggtcggtaaacccggcctgatatatcaccttccagaagcgatttgccggatgagcaaagggaaaaccagtcccggcggaactaagcccagggttgataccgcaaaacacgacccgtaaccctggagccaaaatatcctcaaccatatttactcctttctaacatcaccaggaaaagtataacggattgaaaatacattgtttataaaaacagcaggcgcgcggtaatggctggattgcgacacggagttactttataatccgctaccatggccccttagctcagtggttagagcaggcgactcataatcgcttggtcgctggttcaagtccagcaggggccaccagatatagcaaaggctgacgagaaatcgtcagcctttttctttttatatatcagttactttgcgtgccagtaagccgctgcacgtacccgctgtgggtcatactgttccgcttcaaagcggcggcttaaattcttaacgactttaccttcgccggttatccagatgaagtaatcatcggcagggatttgcatctgcgccagacgcgcatctaccgcctgctcatcatgtgccagccattcgatattaaaaccatcaaggtgcgcgagataatcctgacaggcgttatcccgcacgctaaccagcgcactaacttgcggtttaacggcaagtttgctcaacgtttccaggcggcggcgcaatgcaggcattccggattcatcgcagacatacagctgatacgcgtaatcttccggcaccaccaggctaccgcgcggacctgccaccgtaagtttatcgcccggttgcgcctgcatcgcccagccgctggcgaccccaccgtcgtgaataaagaaatcaatcgccagttcatggcgtagttcgtcatacagcggcgtatagtcacggctcggtgggcgtggtccttccggccagacgatgccctcttccgttaccgttggcggcacaaagtgagcgtcaggttgaggaaagaagagtttgctgtgatcgtcaaagccacggcttgtaaaaccgtccagcgcctcgccgccgaggacaatgcgctgaaaaccggcgctgatgcgctcaacgcgtaacacagtcagttcacggaagcgcagatcattgcgaacgcgctgcgggtagcggggggtgttattcattgttatcgccttcgtgatggtaatcagatatatctaaataaaactcgcaaatgataatgattgttaatcatgataaatgcaagcgatttgtagaactgatatgtctatagtctgataagacgaaccgcctcttctcaggcatcattactcaacgccggatgcggcgtgaacgccttatccggcctacgtgtgagatgagtccacgtttaaaaatcatttttacacttgcaagaacgctcatatcagatataaattagatatatctaattaagcaaaaggaggctgatatgagccatcatcacgaagggtgttgtaaacatgaaggccagccacgccatgagggctgctgcaaaggtgagaagagtgaacacgagcactgcggacacggtcaccagcatgaacacggtcaatgctgcggtggtcgccacggtcgcggcggcggtcgtcggcaacgtttctttggtcacggtgaattacgtctggtgattctggatattctcagccgcgatgacagccacggttacgaattgattaaagcgattgagaatctaacccaggggaattacaccccaagcccgggcgtcatctacccaacgctggattttctgcaggagcagagcctgattaccatccgcgaagaggaaggaggtaagaagcagattgcgctgaccgaacaaggcgcgcagtggctggaagaaaaccgcgaacaggtggagatgattgaagaacgcatcaaagcgcgttgcgttggcgcggcgctgcgccagaacccgcaaatgaagcgggcgctggataattttaaagcggtgctggatttacgcgtcaaccagagcgatatcagtgatgcacaaataaaaaagatcattgcggtgatcgaccgcgccgcttttgatattacgcaactggattaatcgccgcatccgccagtggcgcggtgcaattgccggatgcgacgcttgacgcgccttatccggcctacacccgctacacaccccgcaggcctgataagatgcgccagcatcgcatcaggcattgtgctccaaccgccggatccggcataccgattaatgcagtaccgtcaccgcgtcttccagtcggctggcgcggtgtttcaccatcgcgctcacctgcgcactctcttccaccagctcggcatttttctgggtgatcaggttaagctcatccactgcacgggtcaggctggaaagcccatcggcctgttccagcgtactatggctaatctgggcgatcaactgggtgacgtttttcacctgtgccacaatatcttccatcgtccgtccggcggcgtgtacctgctggctaccggattgcaccttatcagcactggcatcaatcagcttgcgaatatcgttggcagcattagcgctgcggctggctaaatgacgcacttcccctgccaccactgcaaaacctttgccctgttcgccggcacgcgccgcttccaccgccgcattcagggccagaatattggtctgaaacgcaatatcgttaatcaggctagtaatggtgccaatgcgctgggtactgtcggcgatatcgtccattgtcttgatcaccgtggtcatcgcctccccaccctgcactgccgcattactggcagtgatactcagtttatcggcagcgctcgccgtggcagagttctgtttcacgctcgccgccatttggttcatggtcgccaccgtttgctgaacgttatcaactgtctgctgggtatgttcgttcagttcatcggtgcctttcgccagcgtctcactgccatttctgacactggacacctggctactgacatcgttaattagccaacggcacatcaggccaagttgccctaccgcacgtaatgtcagccccagctcatcgctgcgattcagatgctcaacactattacgttctccggtcgccaccttcagtgcctgatgggcaacattttctatcgggcgcacaatctgccattcaaaacaggcgcttgccaacaataccactaacgcacagaggatatacgtcaccaccggggcagcaacaaaccaaagcatggccgccagcaagataaacatcagggtcatcactccacgcgcccgccagcgaagcggtaaactaggcagtttacccagccagcctttacgcaccaccaggcctttatgaatacgcttactggtacgtccggcgttcaacgctttgtacagcggctccaccgccgcgatctcttcatccgtcgcccgggtacgaatgctcatatagccactgatttttccctcgcgcaccatcggtaccgcattggcccgcacccaataatggtcaccatttttgcggcgatttttcacgatgccgctccagggctccccttttttcagggtgaaccacatatccgcaaacgccgcttttggcatatccgggtgacgcaccatgttgtgcggctgcccttgtaactcttgcaaggtatagccgctcacctgcacaaaagtgtcattagcatgagtgatatagctttgcagatcggtagtggacatcagagtggtatcgtccgccagcggggtattttgctgggtgacatacggatgagaagacatgttcgcgtcctgtgcaggttatatggttgttaacttcttgtcagagtttatgtcggccccgctgcggttatctttaaccgattaatttgatttagatcgcaatttgcgatttaaacacaaatctaattccttgatttaaaatactttcactctgttactatacgaaaacgttaattatcttgcccaaaaatcaggcaattattgccctgaaaacgtgcatttgcgcagcaatcatcaaatccatacccgacaaaaaccgtgcaaaataacaacaaatgttaacagatagcattaaatattgcacaaatgataaccgaatttgtgtttatcccgattttcgcgatcgcagccggagtggcgcaatccctgcaatacttaaatcggtatcatgtgatacgcgagcctccggagcatattttgaacaggttacctagcagcgcaagcgctttagcgtgcagcgcccacgccctgaatctcattgagaagcgaacgctggatcatgaggagatgaaagcacttaaccgagaggtgattgaatacttcaaagagcatgtcaatccggggtttttagagtatcgcaaatctgttaccgccggcggggattacggagccgtagagtggcaagcgggaagtttaaatacgcttgtcgacacccagggccaggagtttatcgactgcctgggaggttttggaattttcaacgtggggcaccgtaatccagttgtggtttccgccgtacagaatcaacttgcgaaacaaccgctgcacagccaggagctgctcgatccgttacgggcgatgttggcgaaaacccttgctgcgctaacgcccggtaaactgaaatacagcttcttctgtaatagcggcaccgagtccgttgaagcagcgctgaagctggcgaaagcttaccagagtccgcgcggcaagtttacttttattgccaccagcggcgcgttccacggtaaaagtcttggcgcgctgagcgccacggcgaaaagcaccttccgcaaaccgtttatgccgttactgccgggcttccgtcatgtgccgtttggcaatatcgaagccatgcgcacggctcttaacgagtgcaaaaaaaccggtgatgatgtggctgcggtgatcctcgaaccgattcagggtgaaggtggcgtaattctgccgccgccgggctatctcaccgccgtacgtaagctatgcgatgagttcggcgcactgatgatcctcgatgaagtacaaacgggcatggggcgcacgggcaagatgttcgcctgcgagcatgagaacgtacagccggatatcctctgccttgccaaagcgctcggcggcggcgtgatgccgattggcgcgaccatcgccactgaagaggtgtttagtgttctgttcgacaacccattcctgcataccaccacctttggcggcaacccgctggcctgtgcggcggcgctggcgaccatcaatgtgttgctggagcagaacttaccggctcaggctgagcaaaaaggcgatatgttgctggacggtttccgtcaactggcgcgggaatatcccgatctggtacaggaagcgcgtggtaaagggatgttgatggcgattgagtttgttgataacgaaatcggctataactttgccagcgagatgttccgccagcgcgtactggtggccggaacgctcaataacgccaaaacgatccgcattgaaccgccactgacactgaccattgaacagtgtgaactggtgatcaaagcggcgcgtaaggcgctggcggccatgcgagtaagtgtcgaagaagcgtaatatcaaatcggatggcgatacgacgtcgccatccgatctttttatacgacgcgtacgcccgcaggcatcatccgctccggcgttaacagcacgctttcactgccgtcatcggtttccgcacacaacagcatgcattcgctcgtttcaccacgcattttcgctttttgcagattgcataagaccaccaccgttttccccatcagctcttcttcgctgtagtacggcaccaggctggtcacggtttgcagcgttttttgccccacatcaacctgtacgatgtacagcttgtcggcgttttcatggcgtttcacttccacaatctttccgacgcgcatttccagacgtgcaaaatcagcgtaagccacggtttccattgcttcctcccttagggtaaaattttactaaactatagcaaaagtttttctcaatcctgtaggctaaaaatggagaatgcaggcgtgatcacattcgtgagccgctgtgttaccgttacagcgtcaaagaaacgcgctttatttactgaaaacaggtgacccgataagcacttcctctacaatgggggcgcacatcagggaaagtaaaaaaggtaaacatggcaacactaaaagacatcgcaatcgaagctggcgtatccctggcgacagtatccagggtcttaaatgacgatccgacattgaatgtgaaagaagagacgaaacatcgcattctcgagatcgccgaaaagctggagtacaagaccagtagtgcccgtaaactccagacaggtgcagtcaaccaacaccatattctggctatctacagctaccagcaggagctggagatcaacgatccttactatctggcgatccgccacggcattgaaacccagtgcgaaaagctgggcatcgagctcaccaactgttatgaacacagcggcttaccagacattaaaaacgtcaccggtattttaattgtcggcaaacccacgcccgccctgcgcgccgctgccagcgcgttgaccgacaatatctgttttatcgactttcacgaacccggcagcggttacgatgcggtggatatcgatctggcacgcatcagtaaagaaatcatcgacttctatatcaaccagggcgttaatcgtattggttttattggcggtgaagatgagcctggcaaggcggatattcgtgaggtcgcctttgcggaatatggccgactgaaacaagtggtacgcgaagaggatatctggcgcggcggtttttccagtagcagcggttatgaactggcaaaacaaatgctggcgcgggaagactatccgaaggcactgtttgttgcttccgattccattgctatcggcgtactgcgggcaattcatgaacgaggcctgaacatcccacaggatattagccttatcagcgttaacgatatccccaccgcgcgatttacctttccgccgctctccaccgtgcgcatccattccgagatgatgggaagtcagggcgttaacctggtgtatgaaaaagcccgcgatggtcgcgcgctgccgctgttagtcttcgttcccagcaaattaaaactgcgcggcacgacccgttaaatccccttacacactgtccggcaatcgtttttgccggacagtgctgccgtttattttcgtgatccagttaaagtaaatgcatttacctgctactttttagtaaaaattttactaaactccccagcaattacacaaactaccatcaccatgaatggttccgatttctctctaccgggaggccctatgaatcgctgggaaaacattcagctcacccacgaaaaccgacttgcgccgcgtgcgtacttttttagttatgattctgttgcgcaagcgcgtacctttgcccgcgaaaccagcagcctgtttctgcccttaagcggtcagtggaatttccacttttttgaccatccgctgcaagtaccagaagccttcacctctgagttaatggctgactgggggcatattaccgtccccgccatgtggcaaatggaaggtcacggcaaactgcaatataccgacgaaggttttccgttccccatcgatgtgccgtttgtccccagcgataacccaaccggtgcctatcaacgtattttcaccctcagcgacggctggcagggtaaacagacgctgattaaatttgacggcgtcgaaacctattttgaagtctatgttaacggtcagtatgtgggtttcagcaagggcagtcgcctgaccgcagagtttgacatcagcgcgatggttaaaaccggcgacaacctgttgtgtgtgcgcgtgatgcagtgggcggactctacctacgtggaagaccaggatatgtggtggagtgcggggatcttccgcgatgtttatctggtcggaaaacacctaacgcatattaacgatttcactgtgcgtaccgactttgacgaagcctattgcgatgccacgctttcctgcgaagtggtgctggaaaatctcgccgcctcccctgtcgtcacgacgctggaatataccctgtttgatggcgaacgcgtggtgcacagcagcgccattgatcatttggcaattgaaaaactgaccagcgccagctttgcttttactgtcgaacagccgcagcaatggagtgcagaatccccttatctttaccatctggtcatgacgctgaaagacgccaacggcaacgttctggaagtggtgccacaacgcgttggcttccgtgatatcaaagtgcgcgacggtctgttctggatcaataaccgttatgtgatgctgcacggcgtcaaccgtcacgacaacgatcatcgcaaaggccgcgccgttggaatggatcgcgtcgagaaagatctccagttgatgaagcagcacaatatcaactccgtgcgtaccgctcactacccgaacgatccgcgtttttacgaactgtgtgatatctacggcctgtttgtgatggcggaaaccgacgtcgaaagccacggctttgctaatgtcggcgatattagccgtattaccgacgatccgcagtgggaaaaagtctacgtcgagcgcattgttcgccatatccacgcgcagaaaaaccatccgagcatcatcatctggagcctgggcaatgaatccggctatggctgtaacatccgcgcgatgtaccatgcggcgaaagcgctggatgacacgcgactggtgcattacgaagaagatcgcgatgctgaagtggtcgatattatttccaccatgtacacccgcgtgccgctgatgaatgagtttggtgaatacccgcatccgaagccgcgcatcatctgtgaatatgctcatgcgatggggaacggaccgggcgggctgacggagtaccagaacgtcttctataagcacgattgcattcagggtcattatgtctgggagtggtgcgaccacgggatccaggcacaggacgaccacggcaatgtctggtataaattcggcggcgactacggcgactatcccaacaactataacttctgtcttgatggtttgatctattccgatcagacgccgggaccgggcctgaaagagtacaaacaggttatcgcgccggtaaaaatccacgcgcgggatctgactcgcggcgagttgaaagtcgaaaataaactgtggtttaccacgcttgatgactacaccctgcacgcagaggtgcgcgccgaaggtgaaacgctcgcgacgcagcagattaaactgcgcgacgttgcgccgaacagcgaagcccccttgcagatcacgctgccgcagctggacgcccgcgaagcgttcctcaacattacggtgaccaaagattcccgcacccgctacagcgaagccggacaccctatcgccacttatcagttcccgctgaaggaaaacaccgcgcagccagtgcctttcgcaccaaataatgcgcgtccgctgacgctggaagacgatcgtttgagctgcaccgttcgcggctacaacttcgcgatcaccttcagtaaaatgagtggcaaaccgacatcctggcaggtgaatggcgaaagcctgctgactcgcgagccaaagatcaacttcttcaagccgatgatcgacaaccacaagcaggagtacgaagggctgtggcaaccgaatcatttgcagatcatgcaggaacatctgcgcgactttgccgtagaacagagcgatggtgaagtgctgatcatcagccgcacagttattgccccgccggtgtttgacttcgggatgcgctgcacctacatctggcgcatcgctgccgatggccaggttaacgtggcgctttccggcgagcgttacggcgactatccgcacatcattccgtgcatcggtttcaccatgggaattaacggcgaatacgatcaggtggcgtattacggtcgtggaccgggcgaaaactacgccgacagccagcaggctaacatcatcgatatctggcgcagcaccgtcgatgccatgttcgagaactatcccttcccgcagaacaacggtaaccgtcagcatgtccgctggacggcactgactaaccgccacggtaacggtctgctggtggttccgcagcgcccaattaacttcagcgcctggcactatacccaggaaaacatccacgctgcccagcactgtaacgagctgcagcgcagtgatgacatcaccctgaacctcgatcaccagctgcttggcctcggctccaactcctggggcagcgaggtgctggactcctggcgcgtctggttccgtgacttcagctacggctttacgttgctgccggtttctggcggagaagctaccgcgcaaagcctggcgagctatgagttcggcgcagggttcttttccacgaatttgcacagcgagaataagcaatgaggatcatcgataacttagaacagttccgccagatttacgcctctggcaagaagtggcaacgctgcgttgaagcgattgaaaatatcgacaacattcagcctggcgtcgcccactccatcggtgacagtttgacttaccgcgtggagacagactccgcgaccgatgcgctatttaccgggcatcgacgctattttgaagtgcattactacctgcaagggcagcaaaaaattgaatatgcgccgaaagagacattacaggtagtggaatattatcgtgatgaaactgaccgtgaatatttaaaaggctgcggagaaaccgttgaggtccacgaagggcaaatcgttatttgcgatatccatgaagcgtatcggtttatctgcaataacgcggtcaaaaaagtggttctcaaagtcaccatcgaagatggttatttccataacaaataacaactacggcggcaaaaggagtttgccgccaccgctaccctactcattttcggagatgtgttatgtctgataccaaacgtaatacaatcggcaaattcggcttgctcagcctgacttttgccgccgtttacagctttaacaacgttatcaataataatattgagcttggactggccagcgcaccgatgtttttcctcgcgacgattttttattttattcccttctgtctgatcatcgcagaatttgttagcttaaataaaaacagtgaagccggtgtctacgcgtgggtaaaaagtagcctgggcggacgttgggcatttattactgcctatacctactggttcgtaaacctgttctttttcaccagtctgttgccgcgcgttattgcttatgctagctatgccttcctcggatacgaatatattatgacgccggttgccaccaccattatcagtatggtgctgttcgccttctccacctgggtttccaccaacggggcgaaaatgttggggccaattacctccgtcactagtacgctgatgctgctgttaacgctctcctacattttactggcaggtacggcgctggttggcggcgtacagcctgctgacgccatcaccgttgacgcgatgatcccgaacttcaactgggcgttcctcggcgttaccacctggatctttatggccgcaggtggcgcggagtccgtcgctgtgtacgttaacgacgtcaaaggcggtagcaaaagcttcgttaaagtgatcatcctcgccgggatttttatcggcgtactgtattccgtctccagcgtgctgattaacgtcttcgtcagcagcaaagagttgaaatttaccggcggaagcgtgcaggtattccacggcatggcggcgtattttggtctaccggaagcgttgatgaatcgctttgtcggtctggtgtcctttaccgcgatgttcggttccctgctgatgtggaccgcaacgccggtgaaaattttcttctccgaaatcccggaaggcatctttggtaagaaaaccgtcgaactgaacgaaaacggcgttccggcgcgcgcagcgtggatccagttcctgatcgtcatcccgctgatgattatcccgatgctcggttccaataccgtgcaggatctgatgaatactattattaatatgaccgccgcagcgtccatgcttccgccgttattcatcatgctggcttacctgaatttacgcgccaaattagatcacctgccacgcgatttccgtatgggctcccgccgcaccggtattatcgttgttagtatgctgattgcgatatttgccgtagggtttgtcgctagcacattcccgactggcgcgaatattctgaccatcattttttataacgtcggcggtattgttatcttccttggctttgcgtggtggaaatacagtaaatatataaagggattaacggctgaagagcgccatattgaagcgacgccagccagcaatgttgattaagcagaataataaaaaatgagcaggcattttccctcttcctggatgaggagagggaaaatagtttctgcctttatatttttataattacaacgataaaaggctgtactttttctttagctcatggattaacacaatgaaattaatcactgcaccatgcagagcattacttgctctgccgttttgctacgccttttctgcggcaggagaagaagcacgtccggcagaacatgacgacacaaaaacacccgcaattaccagcacatcttctcctagttttcgtttttacggcgaattaggggttggtggatatatggatttagagggtgagaataaacataaatacagcgacggtacctatattgaaggtggcctggagatgaagtacggctcctggttcggcctgatttacggcgaaggctggaccgtgcaggccgaccacgacggcaatgcctgggtgccagaccatagctggggtggtttcgagggcggaattaaccgtttctatggcggttatcgtaccaatgatggcaccgaaatcatgctcagtctgcgtcaggattccagcctggatgacctgcaatggtggggcgatttcacccccgatctgggctacgtcattcccaatacccgcgacattatgactgcgctgaaggtacagaacttaagcggcaactttcgttatagcgtcaccgcgactcctgccggacatcatgatgaaagcaaagcctggctacattttggcaaatacgatcgctatgacgacaaatacacctatccggcaatgatgaacggttacatccagtatgaccttgccgaaggcatcacctggatgaacggtctggaaatcaccgacggcacaggacagctctatctcacgggcctgctaactcctaactttgccgctcgcgcctggcaccataccggacgcgccgacgggctggacgtaccgggaagtgaaagtgggatgatggtgagcgccatgtatgaagcgttaaagggcgtttatctctccaccgcttacacctacgccaaacatcgccctgaccacgctgacgatgaaaccacctctttcatgcagtttggtatctggtacgaatacggcggcggacgtttcgccacggcttttgatagccgcttctacatgaaaaatgcctctcacgatcccagcgaccaaatcttcctgatgcaatatttctactggtaataaggactgtaatttcatgaaaataaaaactattttaacgccagtaacctgcgctctgctgataagtttttccgcccatgccgctaacgccgacaattataaaaacgtgattaaccgtactggcgcgccgcagtacatgaaggattacgattacgacgatcaccagcgttttaatccgtttttcgatctcggagcctggcatggtcatctgttgccagacggccctaacaccatgggcggctttccgggcgttgcgctgctgacggaagagtacatcaactttatggccagcaatttcgaccgcctgaccgtctggcaggacggcaagaaagtcgactttacgctggaggcatacagtattcccggtgcgctggtgcaaaaactgacagcaaaagatgtgcaagtcgaaatgactctgcgcttcgccacgccgcgcacgagtctactggaaaccaaaatcaccagcaataaaccgctggatctggtgtgggacggcgaactgctggaaaaactggaagcgaaagaagggaaaccgctttccgataaaaccattgctggcgaataccctgactatcagcgcaaaatcagcgccacccgtgatggcctgaaagtcacctttggcaaagtgcgcgccacctgggatctgctgacctccggcgaaagcgaatatcaggtgcataaatccctgccggtgcagactgaaatcaacggtaatcgctttaccagtaaggcgcatatcaacggtagcaccacgctctacaccacctattcccatctgctgaccgctcaggaagttagcaaagagcaaatgcagatccgcgatattctggcgcgtccggcgttttatctcaccgccagccagcaacgctgggaagaatacctgaagaaagggttaaccaatccggatgcgacgccggaacagacgcgcgtcgcggtgaaagcgatcgaaacgctcaacggtaactggcgcagtccgggcggtgcggtgaaatttaacaccgttacaccgagcgtgaccgggcgctggttctccggcaatcagacctggccgtgggatacctggaagcaggcgtttgcgatggcgcatttcaatccggacatcgccaaagagaatatccgcgcggtcttctcctggcagatccagcctggcgatagcgtgcgtccgcaggatgtgggctttgtccccgacctgatagcgtggaaccttagccccgagcgtggtggcgatggcggcaactggaacgaacgtaataccaaacccagccttgccgcctggagcgtgatggaagtgtataacgtcacccaagataaaacctgggtggcagagatgtacccgaaactggtggcctatcacgactggtggttacgtaaccgcgatcacaacggcaacggcgtgccggaatatggcgcgacccgcgacaaagcccacaacactgagagcggcgagatgctgtttacggtgaaaaaaggcgataaagaagagacgcagtctgggctgaacaactacgcccgcgtggtggagaaaggccagtacgacagtctggaaattccggcacaggttgctgcaagctgggaaagcgggcgtgatgatgccgccgtctttgggtttatcgacaaagaacagttggataaatatgtcgctaatggcggcaaacgtagcgactggacggtgaaattcgccgaaaaccgcagtcaggacggaacgttgctgggctacagcctattgcaggagagcgtggatcaggccagctatatgtacagcgataaccattatctggcggagatggcaaccatcctcggtaagccagaagaggccaaacgctatcgccagttggcacagcagctcgcggactacatcaacacctgtatgttcgacccgactacccagttctactatgacgtacgtattgaagataaaccactggcgaacggctgcgcgggcaaaccgattgttgagcgcggtaaagggccggaaggctggagcccgctgtttaacggtgcggcaacgcaggccaatgccgacgcggtggtgaaggtgatgctcgatcctaaagagttcaacacctttgtcccgctgggaacggcggcgttaaccaatccggcttttggcgctgatatctactggcgtgggcgcgtatgggtggatcagttctggtttggtctgaaagggatggagcgttacggttatcgtgatgatgccctgaagctggcggatacgttcttccggcacgccaaagggttaaccgccgatggaccaattcaggaaaattacaacccgctgacaggcgcacagcaaggcgcaccaaatttctcctggagtgccgcgcatttgtatatgttgtataacgattttttccgtaagcaataatttgcaactgctggcggatgcggcgtaaacgccttatccgccctacatgtgcaatcctcctggccggataaaacgcggcaagcgttgcatccggcaactgcaccgcgccactggcggatgcggcgtgaacgccttatccgccctacatgtgtgttcccgtaggtcggataagacgcgacaagcgtcgcatccggcatctgcaccgcgccactggcggatgcggcgtggacgccttatccgccctacatgtgcaattccgtaacctggataaaacgcgacaagcgtcgcatccggcgttatcaccgggcgtattctttttgaatcccatcacaaaccccgcactccccttttcccttttctccggcgacggctaaattagaactcatccgaccacataacaattattttacatactggacaattttatgagctacccgagcctgttcgccccgctggatttaggttttaccacgttaaaaaaccgcgtgttgatgggcagtatgcacaccgggctggaggaatacccggacggtgccgagcggctggcagcgttttatgccgaacgcgcccgtcacggcgtggcgctgattgtcagcggcggcattgcaccagatttaacaggcgttggcatggaaggtggcgcaatgctcaacgacgccagccagatcccacaccatcgcaccattaccgaagcggtacatcaggaaggcggcaaaatagccctgcaaattttgcataccgggcgctacagctaccaaccgcatctggtcgccccgtccgcattgcaggcccccatcaaccgtttcgtgccccatgagttaagccatgaagagatcctgcaactgatcgacaatttcgcccgctgcgcgcaactggcgcgggaggcaggatacgacggtgtagaggtgatgggttccgaagggtatttgatcaacgaatttctgacgctgcgcaccaatcagcgtagtgaccagtggggcggcgattaccgcaaccggatgcgatttgccgtagaagtagtgcgtgcggtgcgcgaacgcgtcggcaacgacttcattattatctaccgactgagcatgctcgacctggtcgaagacggcgggacttttgccgaaacggtagagctggcgcaggccattgaagcggcgggcgcgaccattatcaacaccggcattggctggcatgaagcacgtattccgaccattgccacgcccgtgccgcgcggcgcatttagctgggtcacgcgcaaactgaaaggccacgtcagcctgccgctggtaaccaccaaccggattaacgatccgcaggttgccgacgatattctcagccgcggcgatgccgatatggtaagcatggcgcgaccgtttcttgctgatgcggagctgctgagtaaagcgcaaagcggacgagccgatgagatcaacacttgtattggctgcaatcaggcctgtctcgatcaaatcttcgttggcaaagtcaccagctgcctggtgaatcctcgcgcctgccacgaaaccaaaatgccaatccttcccgccgtgcagaaaaaaaatctggcggtggtcggtgcgggacctgctgggctggcgtttgccattaacgcggcggcgcgtgggcatcaggtaacattgtttgacgctcatagcgagattggcgggcagtttaatatcgccaaacagatccccggcaaagaggagttttacgaaacgctgcgctattaccgccggatgatcgaagtgacgggcgtgacgctaaaactcaatcacaccgtgacggcggatcagttacaggctttcgatgaaacgatcctcgccagtgggatcgtgccgcgcactccgcccatcgacgggatcgatcatccgaaggtattgagttatctcgatgtactgcgcgacaaagcgccggttggcaacaaagttgccatcatcggttgtggcgggattggttttgatacggcgatgtatttaagtcagccgggcgaatccaccagccagaatatcgccgggttctgtaatgaatgggggatcgacagtagcctacaacaggctggtggcttaagcccgcagggaatgcagatcccccgtagcccacggcagattgtgatgctccagcgcaaagccagcaaaccaggacaggggttaggcaaaaccaccggctggatccatcgcaccaccctgctcagccggggtgtgaaaatgatcccaggcgtaagttatcagaagattgacgatgacgggctgcatgtggtgatcaacggcgaaacgcaggtattagcagtggacaatgtggtgatctgcgcagggcaagagccaaaccgcgcgctggcgcaaccgctgattgatagcgggaaaacggtgcatttaattggcggctgcgatgtggctatggagctggacgcacgacgggcaattgcccagggaacacggctggcgctggagatttaaatcgttatttgaagcgccggatgcaacgcatccggcacgtcgcgttaatcaataaacaaggcgggagaaatgccgaatcgcgttgccaattttttagcgtgttccagcgttaatttcctcttcccgctcaaaacgcgactcaccatagatttactgccaatttccggcagatcggaaagggttaaaccatattgatccataagggtacgaatcacggctataccgccaggcatggcttgagccatggcattaaattccgcaaattcgggcgcactttcttcccacgcggttattttggcacacaccagatccagcaaggggttttcaggatcgttgagcagcagatgatctaccagttccagcgcctgggtgtattgttcctcgttctgaatacccgccagaaaaggtgccacagcagttagcttttctcctgcttgcaagatgtcggcaatcgcaatcattttttccccttagtacgatgaacagcggtaaagaaatcgtattctttatgcgtcataacttcacgtatgtagcacttttggctttcaaaaaagaccattgctacaacacgtaattcattgcccccaacattgaaaacataatgcttatccagatatttgaagttatccagagatgggaatactgcttttaaactctcaggttttttgaaatatcccttagcaatcgtgttccccagagccaccaactccgttttatgttgcgggtatttttccgcagcatctttcaatgctttttgagttatcaggtgcattcttcatcacgtccgttgacaaattggcaatatgataacatccgttgccagattggcaacggatgaatttatctgtgtgacggaagaataaacgtagaaaaacgctaaacaagagaatgtagacgatggtgacagggattttttgttttatggaagcgcgattccagaactgggcagacattgccggatgcgacgcttgccgcgtcttatccggcctggagtaacgtgctgaacgtaggccggataaggcgtttacgccgcatccggcaggtaactcccaatcttaccgacgacgtcccagcttcaccgctttcagtaccacaaatttattattcgtcgcaatagtggtgcagttgccgaaaatcttcttcagtttatggaagtaatccaggtgacggttggcaacgatatacagctcgccgttgattttcaggcagcggcgggcgtggtggaacatctcccaggcgacgttatcggtcagcgcatgttgttggtgaaacggcgggttgcagagcacagcattaaagcggaaaggctccacgccggagagcgcgttgttgatcataaactcgcagcgatccaacgcctctggcatgttggtttcaacgttcaaacggctggaagcaaccgccatcgggctttcatcgacaaacaccactttcgcctgcgggtttttatcaagcagcgtcagaccaataacgccattaccgcaaccgagatcgacaatctccccttcgagattctctggcagatgttgcataaagaagcgcgcgccgatatcaagcccggtgcgggagaagacattcgcatggttgtggatagtccagtcagtaccttccagcttccagctaacggtctgcggcgcatcggccagctgcggttcattgaaagtgcaattaatcaggcgcgcttttttccatgccagcgtggtggtggttgggccgagcactttttcgaacagttccagcgtggaagtgtgaatgtcacgggccttggcaccggcaataatacgtgtatcgctcgtgaccactttgcgcagcgcacgcagttgctgttccagcaatgccagtgttttcggcactttgatcagcaccacacccggctgttgcgggtagtcggcggtgctgtcgagaaacttcacgctgctctcatcaatcccgttgaggcgtaaattctcgcgcgtcgccagttcactgatgtaactgtcgccaatgctgtacggcttatgttccgccagtgcgcagcttaacgcaccaaaggcatcattcaggatcaacaccgggccgcggatttctgtgtcgtccaactgttgcagcaaatattcatccgccgcttcccacgcctgtagcgggttaacgtcatccgtcgccggaaaacgttgtagtgtcagactacggaaaccgttgtctaagtggctcatcggccctcctgaatgataaaatttcgacattgcccctgaaaagggtgcgtgagtataccctttttctctttttcgtgggcggttatgagcaatcttacttatcttcagggttatcccgagcagctactttcccaggtgcgaacactgattaacgaacagcgtctgggcgatgtgctggcaaaacgctatccgggaacacacgactacgccaccgataaagccctctggcaatatactcaggatctgaaaaatcagtttctgcgtaatgccccgccgatcaataaagtgatgtatgacaataagatccatgtgctaaaaaacgcgctcgggttacataccgctgtttctcgtgtgcagggcggcaagctgaaagcaaaggtggagatccgcgtcgctaccgtgtttcgcaacgcgccggaaccgtttttgcgcatgatcgtggtgcacgagctggcgcacctgaaggagaaagagcataacaaagcgttttaccagttgtgttgtcatatggaaccccagtaccaccagcttgagttcgacacccgactgtggctaacgcagttgagccttgggcagaacaaaatctgaaaatgatgtcaggcgttatcttttctttctttagcgcctaaaatcgacctcccccctttcgttaaggataacgaccatgctgcgcgcatttgcccgccttcttctccgtatttgtttttctcgccggactctaaagattgcctgcttactgttacttgtggcaggagcgaccatccttatcgccgatcgcgtaatggtcaacgccagcaaacagctgacctggagcgatgtcaacgccgttccggcgcgtaacgtgggtttattgctgggggcgaggccgggtaatcgctactttacccgacgtattgataccgcagcagcgttgtaccacgccggaaaagtgaaatggctgctggtaagtggcgataacggacgtaaaaattacgatgaagcaagtggtatgcagcaggctttgatcgctaaaggcgtaccagcaaaagtgatcttctgcgactatgccggattcagtacgctggatagcgtagtgcgtgccaaaaaggtttttggtgaaaaccatatcaccattatcagccaagaatttcataatcaacgcgccatctggctggcaaaacagtacggcatcgacgctatcggttttaacgcgccagacctcaatatgaagcacggtttttatactcaactgcgggagaaactcgctcgtgtcagcgccgtgattgacgccaaaatcctccatcgccagccgaaatatctcgggcctagcgtcatgattgggccgtttagtgagcatggctgtccggcgcagaaataatgcgtatctgcgcacgtcgaagatgaaaaaggcgtgctacattgacgacagaatccctttatggagtatccacgcgttatgatacgtttcgctgtgattggtacgaactggatcactcgccagttcgtcgaggccgcccatgagagcggtaaatacaagttaaccgccgtatattcccgcagccttgaacaggcccagcacttcgccaatgatttttctgtcgagcatctgtttaccagcctggaagcgatggcggaaagcgatgccattgacgcggtgtatattgccagcccgaattccctgcatttttcccagacacaacttttccttagccataaaattaatgtgatttgcgagaaaccgctggcgagcaatctggcggaagtggatgccgccattgcctgtgcgcgggaaaatcaggtggtgctgtttgaggcatttaaaaccgcctgcctgccgaactttcatttgttgcgccaggcgctgccgaaagtcggcaaactgcggaaagtctttttcaactattgccagtattccagccggtatcaacgttacctggatggtgagaatcccaacacctttaatccggcattctctaacggtagtattatggatatcggtttttactgtctggcgagcgcggtggcgttatttggtgagccgaaaagcgtgcaggcaaccgccagtttgctggcaagcggcgttgacgcccagggcgtggtggtgatggattacggtgatttcagcgtcaccttgcagcacagtaaagtcagtgattctgtcctggcgagcgagattcagggcgaagcaggaagcctggtgattgaaaaactgtctgaatgccagaaagtgtgcttcgtgccgcgtggcagccaaatgcaggatctcacccagccgcagcatattaataccatgctctacgaagcagagctgttcgctaccctggtggatgagcatctggtggatcatccagggctggcggtcagtcgcatcaccgccaaactgctgaccgagatccgccgccagactggggtgatttttccggcagatagcgtaaaactataattgccaaagtaaaacagtgtaaaaggtatgtaacagaccattgactggctgaatggtctgtcatactttgttacctgcaaaggggagtaacttcattgccggtcgatcgtcattacgatgtgtgaaaaaacacatccggtcaccgggcaacccgaaaggaatacgcagacgtattccttttttgttgtaagtgagaccttgccggaaggcgaggtctatgcataaaaagcagcggctgacgtcttccgacgttggccgtttttttatgtgtaaggaacttctatgaatactgtcggcacgccgttgctatggggcggattcgctgttgttgtcgccattatgctggctatcgacctgttgttgcaggggcgtcgtggggcacatgccatgaccatgaaacaggctgcggcctggagcctggtctgggtgacgctgagcttactgtttaacgccgctttctggtggtatctggtgcaaaccgaaggtcgcgccgttgccgatccacaggcactggcctttctcacaggttatctgattgagaaaagcctggcggtcgataacgtctttgtctggctgatgttgttcagctatttctctgttccggcggcattacaacgccgcgtgctggtgtatggcgtgctcggggcgattgttctgcgtaccatcatgatcttcactggcagctggctaattagccagttcgactggatcctgtatatcttcggtgccttcctgctgtttaccggcgtgaagatggcgctcgcccatgaagatgaaagtggcattggcgacaagccgctggtgcgctggctacgcggtcatttgcgcatgaccgacaccatcgacaacgagcatttctttgtgcgtaagaatggattgctgtacgccacaccgctgatgctggtactgattctggtggaattgagcgacgtgattttcgccgtggatagcattccggctatcttcgccgtgaccactgacccgttcattgtgctgaccagtaacctgtttgcgatcctcggcctgcgtgcgatgtatttcctgctggcgggcgtagcagagcgtttcagcatgctcaaatatggcctggcggtgattctggtgtttatcggtatcaagatgctgattgtcgacttctaccatattccaatcgccgtcagcctgggcgtggtgtttggcattctggtgatgacgtttattatcaacgcctgggtgaattatcggcatgataagcagcggggtggataatttttaatctgcctaagccgtgtaccctgtcattaacatgagcaccgttttctccctctcccttccagggagagggtcggggtgagggtaatttttcgcaccgatgctggcctgttcccctcaccctaaccctctccccaaacggggcgaggggactgaccgagtccttttttgatgttgtcatcagtctggaagccgcacgttggctttatttttatgtcaaagaaatgtaaccattaagtttcaaaatatgacctctctttaaaatccagcatttttcgcttcccgaagctgtaactttccttatactcgaccttgcaaacactttgttacatcctgaaagatgcgtcgacagaacgcaccagggatgtgcgacaacacaatgaaaggatcgaaaaatgactacgcaacgtagtccggggctattccggcgtctggctcatggcagcctggtaaaacaaatcctggtcggccttgttctggggattcttctggcatggatcagtaaacccgcggcggaagctgttggtctgttaggtactttgttcgtcggcgcactgaaagccgttgcccccatcctggtgttgatgctggtgatggcatctattgctaaccaccagcacgggcagaaaaccaatatccgccctattttgttcctctatctactgggcaccttctctgctgctctggccgcagtagtcttcagctttgccttcccttctaccctgcatttatccagtagcgcgggtgatattagcccgccgagtggcattgtcgaagtgatgcgcgggctggtaatgagcatggtttccaaccccatcgacgcgctgctgaaaggtaactacatcgggattctggtgtgggcgatcggcctcggcttcgcactgcgtcacggtaacgagaccaccaaaaacctggttaacgatatgagcaatgccgttacctttatggtgaaactggtcattcgcttcgcaccgattggtatttttgggctggtttcttctaccctggcaaccaccggtttctccacactgtggggctacgcgcaactgctggtcgtgctggttggctgtatgttactggtggcgctggtggttaacccattgctggtgtggtggaaaattcgtcgtaacccgttcccgctggtgctgctgtgcctgcgcgaaagcggtgtgtatgccttcttcacccgcagctctgcagcgaacattccggtgaatatggcgctgtgtgaaaagctgaatctggatcgcgatacctattccgtttctattccgctgggagccaccatcaatatggcgggcgcagcaatcactattaccgtgttgacgctggctgcggttaatacgctgggtattccggtcgatctgcccacggcgctgctgttgagcgtggtggcttctctgtgtgcctgtggcgcatccggcgtggcgggggggtctctgctgctgatcccactggcctgtaatatgttcggtattagcaacgatatcgccatgcaggtggttgccgtcggctttatcatcggcgtattgcaggactcttgcgaaaccgcgctgaactctagtactgacgtgctgttcactgcggcagcttgccaggcagaagacgatcgtctggcaaatagcgccctgcgtaattaattgtttaacccctttcgtctacggcggaaggggttttctcaactttaaacggatcaattccccttttctgcatccgccagaaacgaatgatattcaggccattcataagcagaaaactaccctcaatcatcgtgccgcctatgctccccgcccagaagttgtgaatcacccagcaacacgtactaaaccacattacgcagcgcatggtcagccctttacagcagaatagcgcccaggtactgacaatcgtgccgataaccggcaatagttcgacaggatgatggaacttcgcgaggccaattccgccagtcagcacaataaaaatcgccattacccataagctgcgcgtgcgtaaggtaatcaatgtacgaatggcattaaggatggcactggcaccagcgggataggtgcccagaagaaaaaaatgtacgccaataacggcgctatagacgctaagctgctttttgaagcgacgttcgtcacgattgaaaaatgttgtgataccaatcagaaaggcgatgacacccacgccctgggccagccaatacgcggtcatgataaatccttagcaggtatggaaaagcaaacggcgcttcacattatgaaacgccgttttttattaacaactcatttcgactttatagcgttacgccgcttttgaagatcgccagttcgcggaagtcgttacgctcgttacaggtttgcttaccgttggcaaactcaacgatggtgtcgataaattcttccagcaactgcggcatcgctttaccgtggatcaactgacccgcgtcaaagtcgatccagtgttttttcttcgccgccagttcactgttggtggcgattttcaccgtcggcacaaatccaccatacggcgtgccacgaccagtactgaacagcaccatatggcagcccgcacccgccagggcgctggtcgctacggcatcgttacccggcgcacttaacaagttcagccctggcgttttcagacgctcgccgtaacgcagcacgtcaaccacgacgctggaacccgctttctgggtacagccaagacttttgtcttccagcgtggtgataccgcccgctttgttccccgggcttgggttttcatagatcggctgatcatgggcaataaagtactgtttgaagtcgttgaccatggtgaccagtttttcaaacgttgcttcgtcgcggcaatggtccatcagcaactgctctgcgccaaacatctccggcacttcggtcagtacggtagtaccgccgttagcaatcacgtagtcagagaaacgccccagcatcgggttagcagtaataccagaaagaccgtcagaaccaccgcactccagaccaaacttcagttcgctgagtttgcctggctcgcgtttatcgttgcgcatcacgttatacagctgatgcaaatgctcgattccggcttcgatctcatcatcctgctgttggcagatcatgaaatgaacgcgttcaggatcgatatcgcccagcgtttcacggaatgcggcaacctggttgttttcacagcccagaccaatcaccagcactgcgcctgcgttcgggtggcgcaccatgttttgcagcatggtgcgggtattaatgtgatcgtcgcccagctgactgcagccgtaggtgtggctgaagaggaacacgccgtcagtaccttcggcgttgttggtctctttcagaaaacggttctggatctgccgcgcgatgccgttgacacagcccacggttggcaggatccacagctcattacgcaccccgacatcgccgttagcgcgacgatagatctgcacttcacgatctgccgcttgcgcaggcagatcctgaaaatcaggttgatagcgatactgatccagatcgctcagattcgtgcgcgtattgtgggcgtgaacgtgaacacctgccgcaatatccgccaatgcataaccaatcggcaggccatatttgatgacattggccccttttgcgatatccgttaacgcaaatttatgtccacgagcaacatcctggcgcagcgtaacagtctggttatcgacactgacttctgtgccttcagccaaatctgctaaagcgaccgcgacgttatccagcgcatggatcttgatgtattgcatatcaaccccagaccttagttcagttcaatggcgaagtagtcacgcgcattgttaaagcaaatatttttcaccatctcgcccagcaggttgatgtccgccggtgcttcgcccgcttccacccagcgaccgatcatctggcacagaatgcggcggaagtattcgtgacgggtgtaactcaggaagctacggctgtcagtcagcataccgacaaagcggctcagcagaccgagctgcgccagttgggtcatctgacgttccataccgtctttctgatcgttaaaccaccagccggaaccgaactgcattttgcccggcataccttcgccctggaagttaccgatcatggtgcccagcacttcgttatcgcgcgggttcaggcagtacagaatggttttcggcagcaggttttcttcattctgcttgctcagcaacttagacagctcttccgccatcggacggtcgttgatggagtcaaagcctacatccggccccagcagtttgaactgacgcaggttgttattacgcagcgcgccaatgtggtactgctgtacccagccgcgacgtgcatattcggcaccaaggaacaccagtaccgcagttttgaactgcgccacttcgtgctcgctcagggtttcgccagccagacggcgcgccagaatgctgtccagttccgcttcgttcgcttcagcaaacatcaccacatccagcgcgtggtcagacactttacagccgtgagcggcgaagtgatccagacgtttggtcagggcagtttgcaggtcagcaaagcggcgaatgtcggtatcggaaacttcgcccagcttcgccatgtagtcgttaaaggtcgcctgttcgatgttgaaggctttgtccggacgccagctcggcagcactttgatggtgaaagagccgtctttggcgatctctgcgtgatgctccagagaatcgatcgggtcatcggtggtgccgaccattttcacgttcatctgctgcatgatgccgcgcgcggagaagttatcctgcgccagcagttcgttacattcgttccagatttcatcggcagtactcggagaaagcaatttgccagtgataccaaacggacggcgcagttcgaggtgcgtccagtggtataacgggttgccgatagtgtgcggaacagtcgccgcccaggcgtcaaatttttcacggtcagacgcatcaccggtacacagacgctcggccacaccgttggtacgcatagcgcgccatttgtagtgatcgcctttcagccagatgtcatacaggtttttaaaacgatagtcttccgcaatctgctgcggcggcaaatggcaatggtaatcgaaaatcggctggtcttttgcgtagtcgtgatacagacggcgggcaaattcggtatctaacaggaaatcttcagtcataaacggagtcattttcgtcttcctctcaacgagtgagctagcttgcttatggtgcgatgctgacaaagttatcacaccaatttccagagtccgaagatattttcgtgagttagatcaataaacgtagttaaaaaaattactctcaaagtggtaaatctcgctgcaggccgcgccagtactggccttgctgtcgtcaggtaatgtccctacaaatattcccacatttgtgatggctctcaccttttaaagttgtatgacaagttatctttctgccgtcgcaaatcataagtcgacggaatgcaaattgccgattcattcatttgttagatgaatcgggttaaccggtacggaagccgaattagcacgaaactttcatggcaacgttcggggcgtgccggttttttttcggttacccggtcgtaactaacatcttcagcctctggcgggatgatggccgcgcttcctgcggatataacaaaacgatgaggttttacatgcgtaaaattaaagggttacgttggtatatgatcgcactggtgacgctcggcaccgtgcttggttacctgacgcgtaacactgtggcggcagctgcgccaactctgatggaagagttaaacatctccacccaacagtattcctatatcatcgcagcctattctgctgcttatacggtcatgcaaccggtagcaggttatgtactggatgtgctgggtacgaaaatcggttatgcaatgtttgctgtgctgtgggccgtgttctgtggtgcaaccgcgctggcaggtagctggggtggcctggctgttgctcgtggtgcggtcggtgccgcggaagcagcgatgatcccggcgggtctgaaagccagctccgaatggttcccggcgaaagagcgttccatcgcagtaggctactttaacgtaggttctagcattggtgcgatgattgcgccgccgctggtggtatgggcaatcgtaatgcacagctggcagatggcatttatcatctccggtgcattgagctttatctgggcgatggcatggctgattttctataaacatccgcgcgaccagaagcatctgaccgatgaagaacgcgactatattattaatggtcaggaagcccagcaccaggtgagcacggcgaagaaaatgtccgttggtcagatcctgcgtaaccgtcagttctggggtatcgcgctgccgcgtttcctggcagaaccggcctggggtacttttaacgcgtggatcccgctgttcatgtttaaagtttacggctttaacctgaaagagatcgcgatgttcgcctggatgccgatgctgtttgctgacctcggttgtatcctcggtggttacctgccgccgctgttccagcgttggtttggtgtgaacctgatcgtttcccgtaagatggtcgtaacgctgggtgcagtgctgatgattggcccgggtatgatcggcctgttcaccaacccgtatgtcgcaattatgctgctgtgtatcggtggttttgcccaccaggcactgtctggcgcgctgattacgctctcttccgatgtgtttggtcgtaacgaagtggcaacggcaaacggtttaaccgggatgtccgcatggctggcaagtacgctgtttgcgctggttgtcggtgcactggctgacaccatcggcttcagcccgctgttcgcagttctggcagtgttcgacctgttaggtgcgctggttatctggaccgtgttgcagaacaaaccggcgattgaggtggcgcaggaaacacataacgatcccgcaccgcaacattaacgtttcgtgtaagttttagtttcccttcaaagccgccttctcaggcggctttttcatcactgcgagtagagctaaactcgcaaaagtggtataacaaatatagtctgccgtatcatgcctggagcgcatatggaaatcactgaaccacgccgtttgtatcaacaacttgccgctgacctgaaagagcgcatcgaacagggcgtctatctggtgggtgataaactgcctgcagaacgctttattgccgatgaaaagaacgtcagccgtacggtagttcgtgaagccatcatcatgctggaagttgaaggctatgtcgaagtgcgtaaaggtagtggtattcatgtggtttccaaccagccgcgccatcagcaggcggctgacaataatatggaattcgccaattacggtccgtttgagttgcttcaggctcgccagctcatcgaaagtaatattgccgaattcgcggcaactcaggtaacgaaacaggacatcatgaaactgatggccattcaggaacaggcgcgcggcgaacaatgcttccgtgattccgagtgggatttgcagttccacattcaggtcgctctggcgacgcagaactccgccctggcggctatcgtggaaaaaatgtggacccagcgtagtcataacccgtactggaaaaaactgcacgaacacattgattcccgtaccgtcgataactggtgtgatgaccacgatcaaatcctcaaggcgctgattcgcaaagatcctcatgctgctaagctggcaatgtggcagcatctggaaaacaccaagatcatgttatttaacgaaaccagcgacgacttcgagttcaatgccgaccgctatctattcgccgaaaacccggtggtgcatctcgatacagccaccagcggcagtaaatgaaattcctgtccgacaggcgctgcaatgcgcctgtttgtctcgtcggtaagcgaaaagtataaagtgtcagcctgtgtaaatcctctcgccaccctcccctgcattcagcaaaatcagactccacggacatgtaattttgataacgaacaacgttgacctttgttacaattagattcaatttgaatttatgtttttgaatgctttcttatctcacgatttaacagggaatagttcaggctgtgttgatgtatcaaacccgcagaacataccaaaacagcaataacattgcggtagtgcatcttttaaaaccagcgtggcgttaaccgattcaccaggaataatgaatggaacttttgacccaattgctgcaagccctgtgggcgcaggattttgaaaccctggccaatccaagcatgattggcatgttgtattttgtcttgtttgtaattttgttccttgaaaacggcttgcttccggcggcctttttaccgggcgacagtttactggtattggtcggcgtgttgattgcgaaaggcgcgatgggctatccgcaaacgattctgctgctgaccgttgccgccagcctcggctgctgggtcagctatattcaggggcgatggctgggcaatacccgcaccgtacaaaactggctatctcatttacccgcgcattatcatcaacgcgcacaccatctttttcataaacacggtttaagcgcgctgttaattggtcgctttattgcgtttgtcagaacactgctgccgacgattgccgggttaagtgggctgaataacgcgcgctttcagtttttcaactggatgagcggtctgctgtgggtattgatcctgacaactctgggttacatgctcggcaaaacgccggtatttttaaagtacgaggaccagctgatgagttgcctgatgctgctcccggtggtgctgctggtgtttggcctggcaggttctctggtcgtgttatggaaaaagaaatatggaaatcgggggtaagggatgcaaatacctcgcatgagccttcgccagctagcctggtccggcgctgttttacttctggtcggcacgctgttgctggcctggtccgcggttcgccagcaagagtctacgctggcgattcgtgccgttcatcaaggcacaacgatgccagacggttttagtatctggcatcaccttgacgctcatggcattcctttcaaaagtatcacccccaaaaacgacactctgttaattacatttgactccagcgaccagagcgccgccgcaaaagcggtcctcgacagaacattgccccatggctacatcattgcgcagcaggacaataacagtcaggctatgcagtggctgacccggttacgggataactctcatcgcttcggataacttcctgttatccgaaacatatcactcactttggtgatttcaccgtaactgtctatgattaatgaggcggtggttaacactaccgcttcgttgtctggacaatcgttcctttgtaataggtccgaatcacaatggaaggttcaagaatgaaataccgcatcgctttagctgtttctctctttgctcttagtgccggtagttatgccactaccctgtgtcaggaaaaggagcaaaatatccttaaggagatcagctatgccgaaaaacaccaaaaccagaatcgtattgacggtctgaataaagccctgagtgaagtccgggccaactgtagtgatagccagctgcgtgccgatcatcagaagaaaatcgcaaagcagaaagatgaggtggcggaacgccagcaagatttagccgaggcgaagcaaaaaggcgatgccgataagattgccaaacgcgaacggaaactggcagaagcgcaggaagagctgaaaaagctggaagcgcgcgactactaactcacaatagtcactacttactcacctggagaaaactatgagcaaagaacacactacggaacatctgcgtgctgagttgaaatccctttccgatacgctggaagaggtgcttagcagttctggcgagaagagcaaagaagagttgagtaagattcgtagcaaagcggagcaggcactgaaacagagccgttatcgcctgggtgaaaccggtgatgccattgccaaacaaacccgtgtcgcggcggcgcgtgccgatgagtatgtgcgcgaaaatccgtggacgggcgtgggcattggcgctgcaatcggtgtagtgctcggcgttctgctgagccgtcgttaattatggcggacactcatcacgcacaagggcccggtaaaagcgttctgggcatcgggcagcgaattgtttctatcatggttgaaatggtagagacacgtctgcggctggcggtggtggagctggaagaggaaaaagcgaatctctttcaacttttactgatgctgggcctgacgatgcttttcgctgcatttggtcttatgagcctgatggtgctaattatttgggcggttgacccgcaatatcgcctgaatgcgatgattgccaccaccgtggtgttgctgctactggcactgattggcggtatctggacgctacgtaaaagccgtaagtctacgttgctgcgccatacacgccatgagttagcaaacgatcggcagctgctcgaggaggagtcccgtgagcagtaaagtcgaacgtgaacgacgtaaggcgcaactgcttagccagatccagcaacaacggctggatctttccgccagtcgtcgtgaatggctggagacaacaggcgcttacgatcgtcgctggaatatgctgctaagtctgcgctcctgggcgctggttggcagtagcgtgatggcgatctggacgattcgccatcctaatatgctggtccgctgggccagacgcggttttggcgtatggagcgcctggcgtctggttaaaacgaccctcaagcagcaacagcttcgcggttaacttccctctggccggagccattccggccttatccctcaaattttttgaagatttttgacagttttccttgctaacaatcatcattcaccacgtttatgattctctccatcgacagcaacgacgctaataccgcgccattgcacaaaaaaacaatcagcagcctgagtggcgcagtggagagtatgatgaaaaaattagaagatgttggtgtactggtagcgcgcattttaatgccgattctgtttattaccgctggctggggaaaaattactggctacgcgggtacccaacaatatatggaagcaatgggcgtcccgggttttatgctgccactggtgattctgcttgagtttggtggtggtctggcaatcctgttcggtttcctgactcgcaccacagccctgtttactgcgggctttacgctgctgacggcatttttatttcacagcaactttgctgaaggcgtcaacagcctgatgttcatgaaaaacctgacaatttctggcggattcctgctgctggcaattaccggtccgggcgcgtatagcatcgaccgcctgctgaataaaaagtggtaagcacgcgctatacttaacgataaaaaacgaggaggaagctcctcgtttttgctattggaggagagaaaaatgggtcaactgattgacggcgtctggcatgacacctggtacgataccaaatctaccggcggtaaatttcaacgtagtgcttccgcatttcgtaactggctcactgccgatggcgctcctggccccactggcacaggcggttttatcgcagagaaagatcgttatcatctctatgttagtctcgcctgcccgtgggcgcaccgcacgctgatcatgcgcaaactcaaaggactggaaccgtttatttccgtttccgtagtgaacccgctgatgctggaaaacggttggacctttgatgacagttttccgggagcaaccggagacacgctctatcaaaatgaatttctgtatcagctttatctccacgccgatccacactacagcggacgagttactgttcccgtgctgtgggacaaaaagaaccacaccatcgtcagcaacgaaagtgcagaaatcatccgcatgttcaataccgcgtttgatgcgctgggcgcgaaagcgggtgattactaccctccagccctgcaaacaaaaattgacgaacttaacggctggatttatgacaccgttaacaacggcgtgtataaagctggttttgccaccagccaggaagcttacgacgaggcggtggcgaaagtgtttgaaagcctggcacgactggagcagattttaggccagcatcgttacctgaccggcaaccagctaaccgaagccgatattcgcctgtggactacgctggtgcgttttgatccggtgtatgtgacccacttcaagtgtgataagcaccgcatcagcgattacctgaatctgtacggttttctgcgcgatatctaccagatgccggggatcgccgaaacagtcaatttcgatcatatccgtaatcattacttccgcagccataagaccatcaaccctacggggattattagtattggtccgtggcaggatctcgatgaaccgcatggacgagatgttcgcttcggttaaaaaaaggcaccttacgaggtgcctctgataattagctaagtgcatgttgttcatgtcggatgtggcatgaacgccttatctgacatacaaaacattgtacattcaatagattgcataacccgcgcagaccagataagcgtagcgcatctggcgattttgcgcttgtcatcagtcttagcgcgccttcacggcactttattaattccttgaacgaatatttactgccatttcattcacgtctattcttaatttgctgctttaaaaacaagtgattgagcaaaattgaggcaaaaatggactggtatctgaaagtactaaaaaattatgtcggtttccggggtcgtgcgcggcgcaaagagtactggatgtttattctggtcaacatcatctttacgttcgtgctggggctgctggataaaatgttaggctggcaacgcgctggtggcgaaggcatcctgacgacaatctacggtattctggtgtttttaccgtggtgggcggttcagttccgccgcctgcacgacaccgaccgcagcgcgtggtgggcactgctattcttaatcccgtttatcggctggcttattatcatcgtctttaactgccaggcgggtacgccaggcgaaaaccgctttggaccagatccaaaactggaaccttaaaacaaatctgctcgccggatgtctgactcatccggcttttatcattatgttgatgaatgaataatttactaatgtttatttaaaatatttcaatgtcgttatataaattacctataaaaaataaccatgtatttatcttaaatatcaaaacctttataacatccgaaaaagaaagatacgaatagcatttacacaatacccggaatagactttcgtcacttttaattaaagggatgtttttatgcagtggtatttgtccgtattaaaaaattatgttggtttctctggtcgcgcacgtcgtaaagagtactggatgtttactctgattaacgccatcgtcggcgctattatcaatgtcattcaattgattttaggtctggagcttccatatctgtctatgctttatttgctggcaaccttccttcccgtccttgcgcttgctatccgtcgcttacacgataccgaccgtagtggtgcctgggccttgctcttttttgttccgtttattggctggctcgtgcttctggtttttttctgcacagaaggtacttctggcagcaatcgttacggaaacgatccgaagtttggtagtaattaatcttagaattggggcgatatttcgcccctttttattaacaataataaatattattttccgttaaaaagtttgggaatttcccgcagacaccaggatttcgcttcccccatactgtcacgacgccaggccataataatatcgatctcgctggtgctttccgggctgacgacacgcaaccgcccttccgcaatatctttttcgaccataggatacggcatcgtcgccacgccaagccccgccagtaatgcctgacgtttatcttcaatcgtgctcaccgttaagcgcggctgtttgtccagcagctgtacggtcaacaccgggcgctcacgagcggtatccgccaccgcaattccacgatatttcacacgcgtcacttcagataacggttccggctcctgatgaatcgggtgatcaggcgcggcaacgtagacgttcattaacgtatagagcttgcggctgttgatctcgctgctggaacgaaaatgcatatccggcgcgataacaatatccgcccgcccctgctccagccgttcccacgcccccgccagcacttctgtgatgattgccagttgggtattggcttttgccgccagtttgtcgattaacgggaaaaaggcaggtgtcggtaccagcgcttcggtcacaatggtgagatgcgtttcccaaccgcgcgcgagagcttccgcatcagtagtcagtttatctgcggcttccagcaaaacgcgccctcgctccaacaacatcctcccgacattggtgaatttggtacgatggccgctgcggtcaaacagcaccacatccagctcttcttccagtttttgcatggtgtagctaagtgcggaaggcacgcgtcccagctcatccgccgccgccgcaaaactgccccggcgatcgatcgcatccataacccgtagtgcttccagcgttaatgccctttctttggccatttcgttctcattcaggaaatttgaacataccgggcagaatatctggctaacaatgtagcgtccagccccttaccataaaaggaagtaaagagaggtcaagaattatgattactacccgaactgccaggcagtgtggacaagcagactacggatggttgcaggcccggtatactttttcctttggacactacttcgacccgaaattgttaggctatgcctccctgcgtgtgcttaaccaggaagtgctggccccaggtgccgcctttcagccgcgaacctatcccaaagtcgatattttaaatgtgattctggatggagaagcagagtatcgcgatagcgaaggcaatcatgttcaggccagcgccggagaggcgttgctgctctctacccagccgggtgtcagctatagcgaacacaatctcagcaaagacaaaccgttaacgcgaatgcagctttggctggacgcctgcccgcagcgagagaatccgctgattcaaaagctggcgcttaatatgggcaagcagcaattaatcgccagcccagagggtgcgatgggaagcctgcaattacgccagcaagtgtggctgcaccatatcgtgctcgacaaaggcgaaagtgcgaatttccagttgcatgggccacgcgcgtatttgcaaagcattcacgggaaatttcatgcgcttacgcatcatgaagagaaagcggcgctgacctgcggtgatggggcgtttattcgtgacgaggctaacattacgctggttgccgattccccactgcgcgctttgctgatagatttgcctgtctaattgtttttacagggagatgatgatgagtaaaaaattggccaaaaagcgccagccggtgaagcccgtggtggcgaaagaacctgctcgcaccgccaaaaattttggctatgaagagatgttgagcgagctggaagctatcgtcgcggatgctgaaacgcgtttagccgaggatgaagctaccgcgtaaagacaggttgccggatgcggcgaaaacgccttatccggcctacaaaatccaacaacattaacgaattaaacaacccgtaggccggacaagatgcgccagcatcgcatccggcacgatccccaaaacctggcgtttatctggccttgctcgccataatctcgataatctgccgatccgtttgctgcatgctatggcttgctaacgcacacaggttggcaatgctctgctcaacatcatgcgccacaatcccttcattgccggtcacggcggtatcatccagcgccattaacaccgctttccacgcagcgctagcactggtgctaaccttcatcgcgcagctgttgctcgcaccatcgcaaatcatgccgctgacatcgccgatcatactgctgatcgccatgctgatggtttcataacgcccatccaccagccatgccatcccggcggcggcccccattgctgcggtcgttgcggcacacagcgcagacaaacgcggtaactggttatggatgtaaattgcgctcaaatggctaagcatcagcgcacgcgccagccgttcatcatccgctccgaagtgttctgctaccaccaccacaggcattgttgcggtaatcccctggttaccgctgccggagttactcatagccggaagcgtagcgccgcccatacgcgcatcggatgccgcgctggtacgaatcacaatggaactagagagatctttcgccagcaaaccgcgctcgcactgtttttccagcgtcgcgccaatatgcagcccccacttaccgctcaaaccttcctggcttaacgcacaatttagcttcgcggaatcgagaataaagcggatcgccgcaaacgggacttcattgacgaacttcaggatctcagccagcgtcgttctggaaagcaccgtcagcggagactcttgctcgccctctgccacacacgcctgctgggtaaacaccacaccatcgtgcgtctcgatatgcacaatgttggtatgcccgccgacgatggtgacacacgcccacttctcaccgttccagactttggcgcgactgaagaggatttcatcgcaaggttcctggatcttaacggagactttccccgccgccagcagtgctttggcatcggcaattgcctgcgctgttgcgtctttcagcacttccagcccggcgttggcatttccacctaacgcccccagcgccgccgcaatcggcagccccaccattcccgtgccgggaacggtgacgcccagaccgttcttcatcagatttgggctaacccaggcttctacacgttcaaccggaccttccagttctgccgcagcaaccgccgccgccagcgccagactaatcggttcagtacatcccagcgccggttttacttcctcctgaacggcgaggatgtaacgctgccataacggatttaaagtgctatcaaacatattaaaaaccttaaaatttcaggtaaatcaagaaaatgccaggaacggagaaacacacagcaacaaaccagtgacgataatcaggtacagagacatccctttgtatttgtgcaatgctggtactttgtaaaccagccacgccgggatcaggcaccctaccatgccgaaaatcgggctacagatagaggtgaagctcaacaccggtgcgttcagtacgatggcgctccaggccagcaaaatggcgaaaatcatgatgccgcgctgaacgagattttcgttaatcttctcggcaggcatcttgcgacgcaggatgttcattacgatcccttgcgttgcttcgcgaaagcctaaatagacgccaaagaatgcagtcatgacagcaaagatattgagaatgacgctgaccactttcacccacgctgcgccgtcaccgctaataaactgtgcggcaatcgccagcgcggaaatattctgctcataggcttttaccgcttcgtcatgtcccatcgccagcgtgaagctcacggcgtagaaaaagacggtgacaaacaaaatgccaaacgcgatattcattgcccgcaatgctttatgccgcgccacttcaatacttttttcccggctgcgataagagatcaccatcggacttaacgtctggataaacagaatgctcgtcagggtaaacggcagcgtaataatggcgtttttcaccagcagccccagcggcggtaggctaccgacgttatacagatgccacattcccaccatgctcacgcccagcgccgcgaccaccagcagcttggtcagcaccatgccggtgctaattttgaataacaatttctcgccgcgactggagatcgccaccagaatgcaaatcagtaccagaccataaaagggactgtcactcagcaacccttccgtcacgccgaaggtatgcaggtaggaagcactatcgttggtgatggcggtggaatagacgaacatccaaatcaccagcattacgaaatagagcgcacctaacaggatgccccagtttttacctaaataaccgctaatgacgctcgggtaatctttacattctggactttctgccagcgtattaataaacaatcgctgaaacagatacattgccgggtaaccaatcacgctactgagcaaaaatacccacaatcccatcaaaccgacctgcaccgggagaaaaacaatccccgcgccaatcgccatcccgatactcataatcacccagccggtgtcagtactgtcgaatttgatcgcttctcgccactcgctctcactcattccagcacgacccgccggggtcgaagcgtctgcaatgacgcctttattcgatgcaatttccataatttctcgctcaatattttgtagggcttattatttttttccgagccgcatcaaggcgatatgcggtctacgtttttgcaggcgagttattagaataaagaaatgatacgcgcgaggtcagagaaaatcttcacaatcaagactttgaaataacggagatggataagaattttctactaaattaatcgcaggagaatattcattctctatttgcggcagatcacaaaaaaaaggtgcacatttgtgcacccaaggatgaaagctgacagcaatgtcagccgcagaccactttaatggccagtcctccgcgacttgtttcgcggtatttatcgttcatatctttgccggtttcatacatcgtctcgatcactttatcgagactaacacgcggtgcgctggtgcggcgcatcgccatccgcgcggcgtttactgctttcacggcattaatggcattacgttcaatgcacgggatttgtacctgtccggcaaccggatcgcaggtcagcccaaggttatgctccatcgcgatttccgccgcattgcatacctgcgccggactgccgcccagtagttcagttaaccctgccgccgccatactacaggccacgccaatctccccctgacagccgacttccgcgccagagatggaggcgttcattttatacagcgcgccaatagcccccgcggccagaaaatagcgggcaatactccgctcgtttaccggacgacggaacttatcgtaataagccagtactgccggaataatgccgcacgcaccgttagtcggtgccgttaccacgcgcccgccagctgcgttttcttcactaaccgccagcgcgtacatgttgatccagtcgatgacattcatcggatcgttagagatgttatcgctggaaaccagctgacgacgcagcgctacggcacggcgcggcacattgagcggaccaggcagcacgccttcagtgttcatcccacgttcaataccgtcatgcatcacttgccagatacgggcaaaaccggcgtcaatttccgctttgctgcgcagcgctagctcgttgtgcatcatcagaccagatatagacaggccgttgtaatcacacattttcagcagttcacctgcactgtggaaatcgtaaggtacggacgtttcgacatcgtggctcaggccgaagtgttcttcttcgacaataaacccgccgccgacagagtaataggttttacttaatagctcttcctgtcccttccaggcagtgatccgcattccgttctcatggcgaggcaacatttcgggatggaagataatgttctttgctacaggaaaatcaacaatatgcgcaccagatgccactggcagccgcccgctgcgcgttactaactctataaatgcagggatctcatcaatgacaacatcctgcggactgtttcctgccagtcccatgatgatggcgacatccgtggcatggcctttgcccgtcagactcaagctcccgtacagatcgaccacaatatggctcgtcgcggttaataagccgctactttccagccgatcaataaaactttttccggcattcattggccccacggtatggctactggagggaccaatcccaattttgaaaatatcgaatgcactaatcatatccacaccctcggattgccgttcagtgaagtggagcggaacgaccttacgaccgtcccgctcacgaggctttacgcactacgtactgcgatggcttcaatttccagcttcacatctttcggcaaacgcgcgacctgcacacagctccgggtcggataggtcgcctgatgctcatcgaagaactgcttatagacttcgttgatggtggcaaaatcattcagatcggtgataaacacggtcatcttgatgatatcgcccacgctcagcccggcagcaaccacgatcgctttgacgttttcgaggcttaaacgcgcctgatcttgcacatcagccgggatctcaccggtctgtgggcaaaccggtatttgcccggaggtgaagaccatgctgcctaaatcaacgccctgaacataagggccgattgcgcctggggcacgttgcgtttcgataatctttttcatacatcctccggcgtcagagcgcctgggtaaaggtacgactaataacatcctgttgctgttcacgggtcagtgcgttgaagcgcacggcgtagccagagacacggattgtcaggttaggatatttttccgggtgctcgatggcatccagcagcatttcccgattcattacgttgacgttgaggtgttgaccgccttcgacatccgcttcgtggtggaaatacccatccagcaggccgacaaggttggttttacgtactggatcttctttgcccagcgccgcaggaacgatactgaaggtgtagctgatcccatctttggcgtaggtgaacggcagtttcgccacgctcgtcaaactggccacggcacctttgcggtcacgaccatgcatcgggttagcgcccggcgcgaacggtgttccggcgcgacgaccgtccggcgtattaccggttttctggccgtacaccacgttagaagtgatagtcagaatgctctgggtagggacggcgttgcgataggttggcagcgctttaattttcttcataaagcgttcaaccaggtcgcaggcaatgctgtctacgcgctcgtcgttgttgccgtactgcggatattcaccgtcgatttcaaagtccaccgccaggccgttttcgtcacggattggtttcacgcgggcatatttgatggcagacagggagtccgtcgccacgctcaggcccgcgatgccgcatgccatagtgcgatagacatcacgatcgtgcagcgccatcaggctagcttcgtagctgtacttgtcgtgcatgtagtgaatgatattcagcgcgctgatgtactgcaccgccagccagtccatgaagtgatcgaggctgtccatcactttgtcgtaatccagcacgtcgtccatcagcggtgctgttttcggcccgacctgaatcttcagcttctcgtccaccccgccgttaattgcgtagagcagcgttttcgccaggttagcgcgtgcaccaaagaactgcatttgcttaccaatcaccattgggctgacgcagcaggcaatcgcgtaatcgtcgctgttgaagtcagtacgcatcagatcgtcattttcatactgcaaggaagaggtgacgatgctcacctgcgcggcatattttttgaaggcaatcggtaattcttcgctccaaagaatggtcaggttaggttccggtgccggccccatagtgtgcagggtgtgcaaatagcggaaggagtttttggtcaccagcgtacgaccgtccagccccatcccgccgatcacttccgtcgcccagattgggtcgccggagaacaggctatcaaattccggtgtacgcaggaagcgtaccatacggatcttcatgatgaagtgatcgatcagttcctgtgcctgctgctcattgagtacgccagctttaaagtcgcgctcaatgtagatatcgaggaagcttgccgtgcggcccaggctcatcgcgccgccattttggcttttcactgccgccagataagcgaagtagagccactgcaccgcttcctgcgcattctgcgccgggcgagagatatcaaagccatatttcgccgccatttcctgaatctgcaacagcgcatgacgatgctctgccagctcctcacgcagacggatggtggcttccagatcctcgcctttttccagacgagactggagatcggcaaattgcagttcgcgttcacgtaccagataactgatgccatacagcgctacgcggcgatagtcaccgataatgcgcccacggccatagccatctggtaaaccggtcagcacgccagatttacggcagcgcagcatatccggactgtaaacatcaaatacgccctggttatgggttttacgcagatcggtaaacagatattcaaattcactgtccatttctcggccataggcgtggaaactacttttaatcatattaatgccaccgaacgggtgtagcgcacgtttcaacggcgcatccgtttgcaggccaacaattttttccagcggctggttaatatatcccgcatcatgagcggtaattgtggtggcaatattggtatcgaaatcaaccggcgcgtgggttgcattttcgatacggatgccttccattactttttcccacaattccgtggtggcaggcgtcgcttcggcgaggaaagattcatcgccttcatacggtgtatagttatgttgaataaaatcgcggacattaatttcgtttttccagtccgtacctttaaagccaagccatgcgtcggcgtacagcttatcgctggtatcaatatctaccttcatgaaaaataatctctctacaatacttcaactaaattatgcaaattctgcgggcgcgttaactttgcctaaatgaatggcatccaaagcaatcattttttcttcgttagtcggaataacggcacaaatgacacgcgcattttcactggaaacaattcgctcaccacaggagttagagcgattattcatttctgtatcaatctctaagcctaatacagccaaatgttccatgaccagacgacgaattaagctactattctctcctattccgccggtgaatataattccatccaggcgacgtaaactagctgcgtgtccggcaatatgacgggcaattcggtgaacaaaggttttaattgccagttgcgcgcgttcgtgaccttcatgccaggctttttccagaacacgtaaatcgctagaaagaccggaaatacctaataatccgctctctttattcactacgcgttccaggtcacccaggctctggttggtttggctggcgacccaggacatcgcaccaaagtcgacatcgccactgcgggtacccatcatcaagccttccagcggcgtcattcccatactggtatcaacactctgaccgttgcgaaccgcgcagatactcgcgccattgccaagatgcgccacaaccaggccggagtcatcttccgccagattcagcaggctatgtgcgcgctgggaaacatagcggtggctcgtgccgtggaaaccataacggcgtacacctaactcttcataatatttccacggcaggccgtataaataagcttccggagccatcgtctggtggaaactggtatcaaataccgccacctgagttacgcccggaaataattgctgcgcgctttcaataccacttaaattggcgtaattatgcaggggtgccagtggagaaacgcgacggatattatcaatgacttcatcggtaataatggcggactcggtaaaaatactgccgccgtgagcgatgcggtggccaattaaggccacactgtcatttaaattccgtttttccagttcaaatgcaattgccttcaatgcaccttcgtagctgtggtgagccagcggtgctggctctcccccatttacggataagaatgcattttcgctgttaataccgtcggcaataccactcattaatacttcacagtcgctggcatcgagcacggaaaacttaatgctagagctaccacagttaataaccaaaacaaccggaaattcattcatctcttttctcatcctgagttacggattaaaacagtttgtatacgatgttcaggatggtcagcagaccaatcacggtaacaaacacgttatccagacgaccacggtatttcgccagagacggcgctttacggatggcatacatcggcaacaggcacagcagggatgcgataatcggtgcgcccatggcttcaatcaggtcaaggatgttcgggttggcgtaggcaacaacccaggtggagcccatgatgaagatcatgctgatagtgttcagtttacccaggctcactttagttttgtcgcctttataaccaaacttcaggaccaggccattcagaccttccagcgttcccagatagtgaccgaagaaagatttgaagatagccacgagtgcgatgatggaagccgcatattccagtgtaatcgcgaacgttgttttggtaccggtcatggacgcaaagtggttagccagataagaaagcactggaatattctgcgctttggcttccgccatgttggccggagacagagtaaacaggcagctaaaggcaaagaacatcaccactgcaaccatcagcatgctggcacgagaaatgatttgggaacatttacgttcggtgaagtcgcgaccgaagtctttctcatactcttcacgcttagaaaccacgaaggaagagacgattgggctgaagttaaaggagaaaaccatgatggaaatccccagccagacagtgatcaggataccgtcatgaccggttaagctcaggctaccgaggtcaacctggtcgataactgcagagttccagtaagggatcaggctcaaagaaatcagcaccaggctggcgataaacggccataccaggtagctcatcactttaaccatcagatccttaccaaaccagatgacgaaagccatcagcagcaacaggaacagcgccacaaagccgcgattcagcggtgcaaagccgagctggttttcccagaacgtcataaaggtattggtaatagtaacgccataaatccacagcagtgggcaaatcgcgaagaagtacaggaacgtgataaccacgccgccagttttaccaaaatgctcttccaccgtttccgtaatgttgccggaagggttagagccagaaagacacagacgcgccagcgcccggtggcaataaaacgcgatggggtatgccaataccaacatcagaagaatcgggatcagtccgccaaaacctgcgcggatagggaagaacagcaccccggcgccgattgccgtaccaaacaagcctaacgtccatgtggtatcacttttacgccaggagctttgttttgtctggctggatacaatgctatcactagtactcatatcctatcctcaacgaattaattaagcgtcaacgaaaccggtgatttgagagacgcgagaaagatcgatattgccgccggaaataatactgacggtttttctgttttgaatatattggtctaatttaccgcttaataatgcagcacatgccagagcgcctgcgccttcggtgacgactttattgcgctgaattaaggcaatcatactgtttctgatttcgtcttcgctgaccagcacgatgtcatcgactaattcacgaacgatttcgtaagttaaattacccgggcgggagacatcacaaccatccgccagggtgccggtagttcggtgcgtggttatttctccggagtggaaagaagccgccatgccgtgaacgttttcagactgtacgccaataacacgaatggtcgggttaatagatttaattgccaccgcaataccagcaattaaaccgccaccaccaattggcacaatcacgttatcgacatcatagagatcttccataatttccagaccaatcgttccctggccagcaatcactttcggatcatcgtaaggtgggataaaaatacggccttccatttcgacaatttcgctcactttagcgatagtgtcgttgaagttatcaccatgcagaacgacttctgcggagtagtcgcacgttgccgctactttggattttggcgcaccttttggcatcaccactttaccgtcgatacccagcatcgcgcaggagagggaaaccccttgcgcatggttgcccgcagaacaggccaccacgcctttgcgtttttccgcatcggtcagactacttaatttattaaatgcgccacgaattttaaaactacccgtacgctgcatattttcaaacttcaggaatatttcacctttgcaacgttcactaaaatagttggagcgaggcatgcctgttttataaattcgcccagccagtcgttgtttcgcttcaataatgtcatcaatagcaaccggcagatcgtatgtaatatgcattataaaacctcttcgcctgaattaaatatgtaggtaaccgtaaccgacacctgcaagacagacaggtggattatttatgtttaaataaaaacaaataattaaccaacttctattaattgccttcgtctacacccattataagaactatactctttggctaattccaccaaaacgcttgctgcttttttaatacgataatttttgctccataccgcggcatattgtgccacaggtaatgtttcttcaaccggaatagtaataaattgattagaaccaaaaggactcgtcatatcacaaggaattacagttaagaaatcagcattgagaacaagattataaattgtcacgacactgtcggttttaacgatgttttcaatactgatgccatttctttgtaacgtagtaagcagttcgctgtagtaccccatattagtttgtggcaacacccactgttcgttcttcaagctctccagcgtggtggtgccggtgcatgttcgggacttactggctaccagcacaaactcggactcgaacagcggctcaacatgtaaatcctgaagcttcatttctgcacttaacgtaccaatcgcaaaatccagtcgaccgtcgcggattgccggtaagaagctagacagttgcgcttcatacatagaaacctgcgctttcgggaacacctctttgaacttgttgatcatcccactcataaaagtaaaaccaatcaaactaggaaaaccaaaactgacttccaccaccgcctcagaagacataccgcttatctcattaaccatatttttcatttcacgggtaatggattcggaacgggagagtaacaattgaccggcaggtgttaatgttacaccggtatttttccgcaccactaattccacaccaaaataatcttcaatatcgttaatgattttactgacggccggttgagttaaccctaattcttttgcagcgctgccgatagaaccacttctaatgacttcctgaaagactaccaggtgctgcgttttcggaagaagaatagtgctcataacgacctacgttaattacctcattgacggcatgaagtgtatcaaaatgaaatgaacaggatatgtgcgaccactcacaaattaactttcaatactttccagagtatcgttattacaattaaatacctttaaatatcaacaagttaaagtataaaaatcagcataaaccctgatttttgtcaaaaaaaatgacggggataaccatattttatggcgataacatcattcgttatgtggttaatacaaaaaaggggctgagaccatatttcaagcaattaccggataattaccaggcaaaatttgagttaaatttaatgagcaagttcagtaattttattataaataaaccatttagtgtgataaataatgcggcatgtcacatttttagtcgctatttgttggagaacaaacatttattttatcaatattttaaaattagcaatacatgtattgatcatctcgaacaattgattaacgtcaactttttctcttctgacaggacgagtttttgtgaatgcaatcgttttccataaattcttctcccctcataggcgacgaatagcattttgtgttgaggatcacaaaacgaataattgctgatcgccgcgataaggtcagacaaagacaacaagggaaattttcacagagcttttgatcggcgtaggccacagaatgttgcttcgtttactgtaacgccgggtaaatgagcgttttttgatagtgcgaaagaaccctgcgaggaaaataagcatctattattgtttgtcatgatgacaaggcaggcatcaatgaaaggcttcccaattgcgcatatttttcaccctagtatcccgccaatgcacgcagtggttaacaatcacaatagaaatattgattattggacggtaaaaagaaagtttgcagaaattgtctccaccaatgacgttaataaaatttacagtataagtaatgaactgcggagagtattatctgcaataactgcattgaatttctatcatggcgatgttccttctgtcatgatccgaatccaaccggaaaatatgagtccattcattatagatatttctacaggagaacatgatgattatatcatacaaacattagatgtaggcacttttgcaccttttggtgaacaatgtacttgcagtgccgtcaataaaaaagagctggaatgtattaaggagacgatttctaagtattgtgcaaaattcacccgaaaagaagccatcttaaccccccttgtgcactttaataaaaccagcattactagtgattgttggcaaattctcttttttagtcccgatcattttaataatgatttttattgattatttataaaggataaaataatgttccctgttagtagtattggtaatgatattagtagtgatttagtccgtcgaaaaatgaatgaccttcctgaaagcccaacaggaaataacctcgaagcactagcaccaggtatagaaaaactaaaacagacctctattgaaatggtcactttacttaacacgttacaacctggtggaaaatgcattatcactggtgattttcaaaaagaattagcgtacttacaaaatgtaattctttataatgtcagctctcttcgtctggattttttaggttataacgcccaaattattcaacgaagcgacaatacttgtgaacttaccattaatgaaccgttaaaaaaccaggaaatatccacaggtaatatcaatattaattgcccattaaaagatatttacaatgaaatcaggaggttaaacgtaatttttagttgtgggactggagatatcgttgatctatcctctctggacttacgtaatgtcgatttagattattatgatttcacagataaacatatggctaatactattttaaatccttttaaattgaatagtacaaattttactaatgccaacatgtttcaggttaattttgttagtagtacacaaaacgccacaatctcctgggattatttactaaaaataacgcctgttttaataagcattagcgatatgtattctgaagaaaaaatcaagtttgtcgaaagttgtttaaatgagcctggagacattaccgaagaacaattaaaaattatgagatttgcaattataaaatctataccaagggcaactcttacagataaattagaaaatgaattaacaaaagaaatatataaaagcagtagcaaaatcatcaattgcttgaacagaattaaattaacagagatgaaagaattcagtagtgaaaaaatatatgattacatcgatataatcattgaagattatgaaaataccaaagaaaatgcttatctggtcgtcccccaaattaattatactatggatttaaacatagaagactctagcagtgaagagttacttagtgataataccctcgagaaagacgaaaattctccggacaatggctttgaggtcggggaatataacacatatgaagcatataacagtgagaagcaatattttaccagagaggactatacgtatgattacgaccttttaaatgcaatataaacttaataacttcttacaaagtctattattaataccgtagatatttattcatcttaccctgtgcaccaaaagcaaaaactcactgacgcgggtttgaaactgatggcaaccgcaaaaatgcctgatgcgctacgcttatcaggcctacgccatctctgcaatatattgaatttgcgtgcttttgtaggcaggataaggcgttcacgccgcatccggcatgaataaagcgcactcaacaatctgaaacccgccggaacggtttattacgtacatcaggtaaaactgaccgataagccgctttcttttgggtatagtgtcgtggacagtcattcatctttctgcccctccaaaagtaaaaacccgccgaagcgggtttttacgtaaaacaggtgaaactgaccgataagccgctttcttttgggtatagtgtcgtggacagtcattcatctttctgcccctccaaaagcaaaaacccgccgaagcgggtttttacgtaaaccaggtgaaactgaccgataagccgctttcttttgggtatagcgtcgtggacagtcattcatctttctgcccctccaaaagcaaaaacccgccgaagcgggtttttacgtaaatcaggtgaaactgaccgataagccgggttctgtcgtggacagtcattcatctaggccagcaatcgctcactggctcaagcagcctacccgggttcagtacgggccgtaccttatgaacccctatttggccttgctccgggtggagtttaccgtgccacggactgttaccagccgcgcggtgcgctcttaccgcaccctttcacccttacctgatcccgcttgcgcgggccatcggcggtttgctctctgttgcactggtcgtgggtttcccccccaggcgttacctggcaccctgccctatggagcccggactttcctcccctccgcccgtctcccccgaagaggacgacgacgaagcggcgactgtctggtcagcttcggcgcgcagtatagagggtttgcgcgcccttgtcaccccgcgttgcgcattccaatcgccagtgtcgcggcgatattacgactagcacggcagatattgtcataagccccgcggaatgcttcgtccaacgtacctatgctggtcaatacgctgaagaccgcatcaatgccatgctgatgtacaacgccaacatcatcggtcaggctacccgcaatgccaatcaccggtttatggtacttcttcgccacgtttgcgacaccaatcggtaccttcccgtgaatactctggctgtcaatacgcccttcaccggtgatcaccagcgtacaatcgtgaatatgttcctccagattcagcgccgtagtgacgatttcaataccacttttcagttccgcaccaagaaacgccattagcgccgcgcccataccacccgcagctcctgcaccggggacatctttcacatcaacatgcagcgcttttttaatgacctcggcatagtgagagaggttattgtccagctcaacaatcatcgcttcactggctcccttttgtgggccaaagatgcggcttgcgccgttatcgcccaccagcggattggtgacatcacaagcgacgcgaatgacgcaatcttttaagcgcggatcgaggccggaaatatcaatatcattcagagtattaagactaccgccgccaaaaccaatttcattgccgttggcgtcgcataatttcgcccccagcgcctgtaccatgcctgcgccgccatcatttgtagcgctgccgccaatgccgataataatgtttgtcgcaccgctctccagcgcctgcaggattaactcgcctgtgccgcgactagtggtcacgagtggatcgcgtttttccgcaggtaccagctccagcccactggccgccgccatttcaataaacgcggttttgccatcgccggagatcccccaactggcattcactttctcgcccagcggccctgtaacccaggcgtgacgttcagccccctgggtggctgcaatcatcgcttccaccgttccttcgccaccgtcggcaaccggaacagaaacgtactgtgcatcaggaaaaatttcccgaaatcctttttctatcgcctgcgcaacctcgctggcagataaactttctttataagagtctggggcgattacgattttcatacctatgcctgttaccacatgacgccggagggcgtttctcttattcggcctggattccaggcccggattgcaatacgccatccgggcacgacgtcattaacgagtaacttcgactttcgccagtttttcgtagtagcacgccagggcgctatgatccgccgttcctaaaccatctgctcgcagtgcctgcatcatctccataaccgcagctgtgagcggcagttgtgcgccgacgccgtgagaagtatccagcgcattcgccagatccttaatatgcagatcaatacggaagcccggcttgaagttgcggtccatcaccatcggcgctttggcatccagcacggtactgcccgccagtccaccgcgaattgcctgataaaccaggtccgggttaacgcccgctttagttgccagcgttaacgcttcactcatcgcggcaatattcagcgccacaatgacctgatttgccagtttggtgacgttacctgcaccgatttccccggtatgcaccacggaacccgccatcgctttcatcaaatcatagtatttgtcgaaaatagccttgtcgccgcccaccatcacactcagcgtaccgtcgatggctttcggttcaccgccgctcaccggagcatccagcatatcaatgcctttcgctttcagcgcttcgctgatttcacggcttgccagcggtgcgatagaactcatatcgatcaataccgtacctggcttcgcgccttcaataatgccattctcacccagcgccacctctttcacatgaggggagtttggcagcatggttatgatgacgtcgcactgttcagcgatcgctttagccgtagacgctgtttctgcacctgcagcaatcacgtcagcaatagcttctgggttacggtcagcaaccaccaggctgtaacctgctttcagaaggtttttactcattggtttacccataatccccaggccaataaaaccaactttcatagtcatatcaatcatctctcttgttgcggtggtggttattttttaaaggtatcagccagtttctgagtggcagagcggaagacgccgagatcgctgccgacagccacaaacgtcgcgccccattccagataacgacgcgcatcggcttcgaccggcgcgaggataccgctgggtttgccgtgcgcgctggcacggttaaaaatgtgctgaattgctttttgtacatccgggtgacttgcattgccgagatggcctaatgccgcggccagatcgctggggccgacgaagatgccgtctacgccttcggtagcggcaatggcatcgacgttatctacgccctgctgactttctatctggaccagaatagtgatgttcttgttgctctgagcgaaataatccgccacggtgccaaacatattggcgcggtgagaaacggagacgccgcgaatgccttccggtgggtaacgggtacttgccaccgccagctctgcttcctcttttgtttctacaaaaggaatcaggaagttatagaaaccgatatccagaagacgcttaataattaccggctcgttggtcggcactcgcactactggcgcgctggcgctgcctttcaaggccattaactgcggaataaacgtggagatatcgtttggcgcatgttcgccatccagcaccagccagtcaaacccagccaaaccaagaacttcagtgctaatcgggttagagagtgcactccagcaaccaatttgtacctgtttcgcagccagtgcggctttgaatttattcgggaaaacatcgttattcatcgcttatacctttgcttatttctgcaattccatacgtttaatgtcgccaactacgaagaggtagcagaccatcgccatcagcgcactacatcccacgaaaaccagtgctgcattgaaggagtgcagttcacttaccaggtagccaatcaccagtggagtgacaatggaggcaacattgccaaagacgttaaagacgccgccgcagaggccaacaatctctttcggcgcggtgtcagaaatcaccggccagcccagcgcaccaaatcctttgccaaagaaagccagcgccatcagcatgaccaccagcgtggtgttgttggtgtagttacataagatgatggtggaagccagcaacattcccagcacaatcggtagcttacgtgccagggtcagggataaaccgcgtttgatcagataatcgctgaagacacctcccagcacgccgcccgcaaaaccacacagtgctggaatgctggcgaccagacccactttcagaatgctcatgcctttttcctgcaccagataaatcgggaaccaggtgaggaagaaccaggtgatggtgttgataaaatattgtccgaaaaatacgcccagcatcatgcggttagagagcaattgcttgatgtaatgcagtttgggtccgcttgctgccgcactgcccggctttttgtggtccatatcgaccaccgcgccattttcagagataaacttcagctcttccgcagacatacgtgggtgatctgtcgggttatgaatcaacttgatccacagcgccgtcagcacaaaaccaatcacccccataacggtaaagacgtgctcccagccccaggcgaaagtcagccagccaagcagcgggctaaagagcgccaggctgaaatattgcgcgctgttaaagatggcggaggcagtaccacgttctttcgtcgggaaccaggcggcgacaattcgggcgttcgccgggaaacttggcgcttcgctgaagccgagcataaagcgcataaagaacatggagatccctgcccaggccagcgggaacatatcaacaaagccttgcaggaaggtgaataggctccagaaaaagaggctgtaggtgtaaacttttttgctgccaaacttatcaagcagccagccgccggggatttgcatcagcaagtaggcccagccaaaagcggagaagatgtaacccatgctaaccgcacttaactgcaactcttttgccacttcggtaccagcaatagacagcgttgcacgatcggcgtagttaacggcggtaacaataaaaataatcagtaatattaaatagcgggtatgcacgcctttctttttttcgtcaacggtgtccagaatcattttatttacctcgggtacttatgctgatttttattattatggggaaggtgttatttatgagtttcatttatgccgtaacgacaatgaactcgggaattagtataagcagcgcgagaataataatcattgtgcaaatgctaatttaattaatactatttaaatattattttgagcatatgcacataaggttgcgcgctaaagcacagatttgcgctttaccttaccgggcggcactgcaatccctgaaatgattgacattgatcacatttctgcgtttaaactcctgacattcttatttcacccaatgaagtcatttatttttaaatgagaccaggtcctcattttaataacccctggctggagaatattgcacaatggccaacatcgaaatcagacaagaaacgccaactgcgttttatataaaagttcacgacacagataatgtggcaattattgttaatgataatggcctgaaagcaggaacgcgttttccggatgggctggaattaattgaacatattccccaggggcataaagtcgcattgctggacattccggctaatggtgaaattattcgttatggcgaagtgattggttacgccgtgcgtgcaatcccacgcggaagctggatcgacgaaagcatggttgtactaccggaagcgccgccgttacacacgctgccactggcaaccaaagtcccggaacccttaccgccgctggaaggatacacctttgagggctatcgcaatgccgatggcagcgtgggcaccaaaaacctgctcggtatcaccaccagcgtccactgtgtggcaggcgtggtggactatgtagtaaaaatcattgaacgcgatctgctaccgaaatacccgaacgtcgatggcgtggtggggctgaatcatttgtacggttgtggcgtggcgattaacgcaccggcggcagttgtacctatccgtaccattcacaatattagcctgaatcctaactttggcggcgaagtaatggtgattggcctgggttgtgaaaagttgcagcctgagcgcctgctgactggaacggatgatgtgcaagctattccagtagaaagcgccagcattgtcagtttgcaggatgaaaagcatgtcggttttcagtccatggtcgaggatattttgcagatcgccgaacgccatctacaaaaactgaatcaacggcagcgagaaacctgcccggctagtgaactggtcgttggtatgcagtgcggtggcagcgatgcgttttctggtgtaacggcaaacccggcggttggctatgcgtctgatctactggtgcgctgcggcgcaacggtgatgtttagtgaagtaacggaagtgcgtgacgcgatccatctgctgacaccacgcgcagtgaacgaagaggtcggcaaacggctgctggaggagatggagtggtacgataactatctcaatatgggaaaaaccgaccgcagcgccaaccctagcccgggcaacaagaaaggcggtctggcaaacgtggtagagaaggcactcggctccattgctaaaagcggtaaaagcgcaattgttgaagtgctgagccccggtcaacgcccgactaaacgcggattaatttacgccgcgacgccagccagcgattttgtctgtggcacgcaacaggtggctagcggtatcacagtgcaagtgtttacgaccggtcgtggtacgccgtacggcctgatggcggtacccgtcattaaaatggcaacccgcaccgagctggcgaaccgctggtttgatttaatggatattaatgcgggcaccatcgctaccggcgaagaaactattgaagaggtgggctggaagttgttccactttattctcgacgtcgccagcgggaagaagaaaaccttcagcgatcaatgggggctgcataaccagctggcggtgtttaacccggcaccggtgacctgatttcttttggaacgtccctcgcaaaacatggccttagtgccatgtttttattgtttaaagcccccacgtccattaataatgcatttgcattaccttagttcaagcttataatttgagcagaaaacaggctgtaaaaggacagtgaatcatgcccgctaatgctcgctctcacgctgtactgaccactgaaagtaaggtcacgatacgcggacaaacaactatccccgcgccagtgcgtgaggccttaaaactgaagccaggccaggacagcattcattacgaaattctgcctggtgggcaagtatttatgtgccgactgggagatgaacaggaggatcatactatgaatgcatttttgcgttttctggatgcagatatccagaacaacccgcaaaaaactcgtccattcaacattcaacaaggaaagaaacttgtcgctggcatggacgtcaacattgatgatgagattggcgacgacgaataatggattttccacaaagggttaatggttgggcgctatatgctcatccctgttttcaggaaacctacgacgctttagttgccgaagtcgagacattaaagggaaaagatcctgaaaattatcagagaaaagccgccacaaagttattggcggtagtccataaagtgattgaggagcatatcacggtcaatccaagtagtccggcattccgtcatggcaagagcttaggctctgggaaaaataaagactggagtcgggtaaaatttggtgctggtcgttatcgtctcttctttcgttatagtgaaaaagagaaagtcatcattctgggatggatgaacgatgaaaacactctgcgcacctacggtaaaaaaacagatgcctataccgtattcagcaaaatgttaaaaagaggacatcctcctgccgactgggaaaccctcacccgagaaacagaagaaacccattgatggtgttcacaatgcccgccgaacgcattcgtgttgaccagcgggcatcctttctcactccccgaccagaatcacttcaaccccagcctttcgcagtccttccaggctatccgcaggaatgccttcatcaacaatgatcatgtcgatacgttgagtatcaatgatcttatgtaaactggaacgattgaacttactggaatcggtgaccacgatgatccgttccgcaacttcgcacatccgacggtttaaacgagcttcatcttcattatgtgtgctgacgccgcgctccagatcgatcgcatctacaccaagaaacagcatatcgaagtggtaattttgcaggctttgctcagcctgatcgccgtaaaaagattggctctgacggcgcaaatgcccgccggtcatcagcagctcaacgccttccgcttccagcaacgcattagccacgttcataccgttggtcatcgcaattacgtcagtgtgcttgcgcatcagacgagcaatctcaaaagtggtggtcccggaatcgaggataacccgatgacctggctgaatcaactcaacggcagctttcgcaacgctgcgtttcatcgcggtgttcagtgcgcttttatcttccacacttggctcgacactcggcgtcgtgctatcgcagatcaacgcgccaccataggcacgcacagcgatcccctgcttttccagaaacgccagatcgttgcggatcgtcacagtagatacgccatacaatgcgctcagatcgttaacctgcacactcccttgctgtcgcagacgctgaatgatctgttctcgtcgctcgctggtgccagtcactcgcttctcaccactagcgtcggtattactcatagtaagtcctttcgtaaaactttcgtttcatttcgttttgcctattaacgcctttctattaagcaaatgcaagcccaccttgcccattgacgcaagctactctcgtttcagtgactttcattatgtttcttttgtgaatcagatcagaaaaccattatctttcgttttatttttatctcaccatgacgcagtatcaactgaaacaaaacgaaagattaatatcgcagtaatctgaactggagaggaaagtgaaacatctgacagaaatggtgagacagcacaaagcgggcaaaacaaatggaatttatgccgtttgttccgcacatccgctggtgctggaagctgcaatccgctacgccagtgcaaaccaaacgccgttactgattgaagcaacctccaatcaggtagaccagttcggcggttataccggaatgacgcccgccgattttcgcggctttgtttgtcagctcgccgacagcttgaatttcccgcaggatgcgttgattctgggtggtgaccatctggggccaaaccgctggcaaaacctgccggccgctcaggcaatggccaatgccgatgatttgattaaaagctacgttgcggcaggattcaaaaaaatccaccttgattgcagcatgtcctgtcaggacgatccgattcccttaactgatgacatcgtggctgaacgcgccgcccgtctggcgaaagtggcggaagaaacctgtcttgaacactttggcgaagccgatctggagtatgtcattggtaccgaagtgccggtacctggcggcgcgcatgaaaccttaagcgagctggcggtcaccacgccggatgccgcccgcgccacgctggaagcccatcgtcacgcctttgaaaagcaaggtttgaatgccatctggccacgcatcattgccctggtggttcaacccggcgtcgaattcgatcacaccaacgttattgattatcagcccgccaaagcgagcgccttaagccagatggtcgaaaactacgaaacgctgattttcgaagcgcactctaccgattatcaaacgccgcaaagcctgcgccagctggtgattgaccactttgccattctgaaagttggcccagcgctgaccttcgccctgcgtgaagctctgttctctctggcggcgattgaagaagaactggtgccagcgaaagcctgttctggtctgcgtcaggtgctggaagacgtgatgctcgaccgcccggaatactggcaaagccactaccacggtgacggcaacgcgcgtcgtctggcgcgtggttatagctacagcgatcgcgtgcgctattactggccggacagccagattgatgacgctttcgctcatctggtacgtaatctggcggatagtccaattccgctgccgctgatcagccagtatctgccgctgcagtacgtgaaagttcgctccggcgagctgcagccaacgccacgggaactcattatcaaccatattcaggacatcctggcgcagtaccacacagcctgtgaaggccaataagcaaaacaaagaggaacacgctatgccaaatattgttttaagccggattgatgaacgcttgattcacggtcaggtcggcgttcaatgggtcggatttgcgggggcaaatctggtgctggtagccaacgatgaggttgccgaagatccggtacaacaaaacctgatggaaatggtactggcagaagggatcgccgtacgtttctggacgctgcaaaaagttatcgacaacattcatcgcgccgccgatcgacagaaaatcctgctggtttgtaaaacacccgccgatttcctgacgctggtgaaaggtggcgttccggtgaatcgcattaacgttggcaatatgcactacgccaatggcaaacaacaaatcgccaaaacggtttctgtggatgcgggcgatatcgcagcatttaacgacctgaaaaccgctggggtggaatgcttcgttcagggcgtcccgacagagcctgctgtggacctctttaaattactttgagggattcatcatggaaatcagcctgttgcaggcatttgcgttgggcattatcgcctttatcgctggcctggatatgtttaacggcctaacccatatgcaccgcccggtggtcctcggcccgttggtcgggctggtacttggcgatctgcataccggaattttaaccggcggtacgctggaactggtgtggatggggctggccccgctggcgggcgcacagccgcctaacgtgattatcggtactatcgtcggcacggcgtttgccattactactggcgtgaaacccgatgtcgcagtaggtgtcgccgtacctttcgctgtcgcagtacagatggggattaccttcctgttcagcgtgatgtccggcgtgatgtctcgctgcgacctggcaacaaacccgcgccgcatttgatgctggtgccgacggcctggtgcattgctataacgggatgacaggtttacatcaccgcgaaccgggaatggttggcgcgggattaacggacaagcgcgcctggctggaactgatagccgatggtcatcatgtgcatccggcggcaatgagcctgtgttgttgctgtgcgaaagagagaatcgtactgatcaccgacgcgatgcaggcagctgggatgccggatggtcgctatacgttatgtggtgaagaagtgcagatgcacggtggcgttgtccgtaccgcgtctggtgggctggcgggcagtacgctgtctgttgatgcggcagtgcgcaatatggtcgagttgacgggcgtaacgcctgcggaagccatccatatggcgagcctgcatccggcgcgaatgctgggtgttgatggtgttctgggaagccttaaaccgggcaaacgcgccagcgtcgttgcgctggatagcgggctacatgtgcaacaaatctggattcagggtcaattagctagcttttgatagtttgctcctttattgggccttcacttcccccgtaaggcctttctttttctttcgttttgatctgtgcagcggtgtcggatgcgacgctaacgcgtcttatccgacctacagttggtgaccgcaaggccggataaagcgtttgcgccgcatccagcaatcccttttgcttcctttatcttttctttcaacgatcacaaatttcgttttatttcttttttctccattgaactttcagtttcttttctatagattttaatcaacgaaagacatcaccaagtgaaatgaaacgaaaggcaagtgaaagcgacaacgcccgacgtcaagttcatcagactaaggattgagttatgccagaaaattacacccctgctgccgccgcaaccggtacatggactgaagaagagatccgccatcagcctcgcgcatggatccgtagtctcaccaacatcgacgcgctacgttccgcgctcaataacttccttgaaccgttactgcgcaaagagaatctgcggatcatcctgaccggagccggaacgagcgcatttatcggtgacatcatcgcgccgtggctcgccagccataccggtaaaaacttcagcgccgtaccgaccaccgatctggtcaccaatccgatggactacctgaacccagctcatccgctgctgttgatctccttcggtcgatccggcaacagcccggaaagcgtcgcagccgtggaactggcaaatcaatttgtaccggaatgctatcacctgccgatcacctgcaacgaagcgggcgctctttaccaaaacgcgatcaacagcgataacgcgtttgccctgctgatgcccgcagaaacgcacgatcgcggctttgcgatgaccagcagcattaccaccatgatggccagctgcctcgcggttttcgcacctgagacgatcaacagccaaaccttccgcgacgtggcggatcgttgccaggcgatcctgaccagtctgggcgatttcagcgaaggtgtgtttggttacgcaccgtggaaacggatcgtttatctcggtagcggtggcttacagggcgcagcacgcgagagcgcgctgaaagtgctggaactgacggcgggtaaactggcggccttttatgattctccaaccggattccgtcatggaccaaaaagcctggtcgatgacgaaacgctggtggtggtatttgtctccagccacccttacacccgtcagtatgatcttgatctgctggctgaacttcgccgtgacaaccaggcaatgcgtgtaatcgccatcgccgcggaaagcagcgacatcgtcgctgccggtccacatatcatcctgccaccgagtcgtcactttatcgacgttgagcaggcattttgcttcctgatgtacgcccagacgtttgcactgatgcagagcctgcacatgggcaatacgccggataccccaagtgccagtggcaccgttaaccgcgtggtgcaaggcgtaatcattcatccgtggcaggcataagaggatcgcattatgagcattatctccactaaatatctgttacaggacgcccaggccaatggctacgcggtgcctgcttttaacattcataacgccgagacgatccaagcgatcctcgaagtgtgcagtgaaatgcgaagcccggtgatcctcgccggaacgccggggacctttaaacacatcgcgctggaagagatctacgccctgtgtagcgcctattccacaacctacaacatgccactggcgctgcatctcgaccaccacgaaagcctggatgatattcgccgtaaagtccacgcaggtgtgcgcagtgcgatgatcgacggcagccacttcccgtttgccgagaacgtgaagctggtgaaaagcgttgttgacttctgccacagtcaagattgcagcgtggaagcagaactgggccgcctgggcggtgttgaagatgacatgagcgttgacgccgaaagtgcattcctgaccgatccacaagaagctaaacgctttgtcgaactgactggcgtcgacagcctggcggtagcgattggtacggcgcacggcttatacagcaaaacgccgaagattgatttccagcggctggcggaaattcgtgaagtggtggatgttcctctggtgctgcatggtgccagcgatgttccggatgaatttgtccgtcgcactattgaacttggcgtcacaaaagtgaacgttgccacagaattaaaaatagccttcgctggcgcggttaaagcctggtttgcggaaaatccgcagggtaacgatcctcgttattatatgcgcgtcggaatggatgcgatgaaagaagttgtcagaaataaaattaatgtctgtggtagtgcgaatcgaattagtgcataatcattagttttttatgatttatcccaatgtacttcccgattaatatcggggagtgccttaatggaaaaggagataactaaaccttaataaatacatcactacaatatcgcaacaataatatatttaaaaaaattatattattcaactttatggtgaggattacacaatgaccagtccaaatattctcttaacccgtattgataaccgtctggttcacggtcaggttggcgtgacctggacatccaccatcggtgcaaatctgctggtagtcgtggatgatgttgtcgctaacgatgatattcaacagaaattaatgggtattaccgcggaaacctacggctttggcattcgtttctttactatcgaaaaaaccattaacgtcatcggcaaagctgcaccacatcagaagatcttcctgatttgccgtacgccacaaacggtacgtaaattggtagaaggtggtattgacctgaaagatgtcaacgtcggcaatatgcatttcagcgaagggaaaaagcaaatcagcagtaaagtttatgtcgatgaccaggatctcacggacttacgttttattaaacaacgtggcgtgaatgttttcattcaggacgtccctggcgatcaaaaagaacaaatccctgactaaatctaaaatcgccttaatattggtttgaggtaataaaaatgcatgaaataaccctacttcagggattatccctggcggcgttagtttttgttctggggattgatttttggctggaagccttatttttattccgcccgataatcgtttgtaccctaactggcgctattctcggtgatattcagactggcttaattaccggtggtctgacagagttggctttcgccggattaacccctgcaggtggtgttcagccgcccaacccgattatggcgggtctgatgaccaccgtcattgcatggtctacgggcgttgatgccaaaacagcaattggtcttggcctgccgtttagtttgttaatgcagtacgtcattctgttcttctattccgctttcagtttatttatgaccaaagccgataaatgcgcgaaagaggcggatacggcagcgttttcccggcttaactggacaacgatgctcatcgtcgctagtgcgtatgcggtgattgctttcctctgtacttacctggcacagggggcgatgcaggcgctggtgaaagcgatgcccgcctggctgacccacggctttgaagtggctggcggtattctgcctgccgttggttttggcttgctgctgcgcgtaatgttcaaagcgcaatatatcccttacctgatcgccggtttcctgtttgtttgctacatccaggtcagcaacctgttgccggttgccgtactgggcgcaggctttgcggtgtatgagtttttcaatgcgaaatcccggcagcaagcgcaaccgcagcccgttgccagtaaaaatgaagaagaggactacagcaatgggatctgaaatcagtaaaaaagatatcacccgtctgggctttcgtagcagcctgctgcaagcgagctttaactacgaaaggatgcaggcgggcggttttacctgggcgatgttgccgatcctgaaaaagatttataaggacgacaaaccgggcttaagcgcggcgatgaaagataacctcgaatttattaatacccacccgaatctggtcggattcctgatggggttattaattagcatggaagaaaaaggagaaaaccgcgacaccattaaaggcctcaaagtggcactgtttggcccaatcgccgggattggcgatgcgattttctggtttactttgttgccgattatggcgggaatttgcagtagttttgccagccagggaaacctgctggggccgattctatttttcgccgtttacctgcttatctttttcctgcgcgtcggctggacccacgtcggttatagtgtcggcgtgaaggcgatcgataaagtgcgagagaacagccagatgattgcccgtagcgcaaccatcctcgggatcacggtaatcggcgggctgatcgctagctatgtgcatattaacgtggtgacaagctttgccatcgacaatacccacagcgttgcgctgcagcaggatttcttcgataaagtcttcccgaacattttaccgatggcctacaccctgctgatgtattacttcctgcgggtgaaaaaagcgcatccggtgctgttaatcggcgtgacttttgtgctctctattgtttgttccgcattcggcattttgtaaatggaacgaggcactgcgtctggtggtgcctctttacttaaggaatttcatcctgtgcaaacccttcagcaagttgaaaactatacggcgttaagtgaacgtgccagcgaatatttattggccgtgatccgtagcaaaccgaatgccgtgatttgcctggcgaccggagccacgccattactgacgtatcattatctggtagaaaaaatccaccagcagcaggttgatgtcagccagctcaccttcgtgaagctcgacgaatgggtggatctgccattaacgatgccaggcacctgcgaaactttcctgcaacagcatatcgtgcagccgctggggctacgtgaagaccagctcatcagctttcgctccgaagagataaatgagacagagtgcgaacgggtaacgaacctgattgcgcgcaaaggcggtctggatttatgcgttctcggattggggaaaaacggtcatcttgggctgaacgaaccgggagaaagcctgcaaccggcctgccatatcagtcaacttgatgccagaacacagcaacatgagatgttaaaaaccgcgggtcgccccgtgactcgtgggatcaccttaggcctgaaggatattctcaatgcccgcgaagttttgttactggtgactggcgaaggaaagcaggatgcgacagatcgttttctcacggctaaagtctctaccgctatcccggctagttttttatggctgcacagtaactttatttgtttaattaacacctaaccagatgaaaaatttgctcaaaatgtttaaattaacttatgtaacagtcacgcattatattaaataacatttgactgggttgaacataacgccgatagcaaaaggagttatgttcaacaatttaattttagatatacatataacttgttctattaataaatcacctcgtattctgactcgccccctggcgcagcaaagtcaggcatttatactcttttgaatacatagaaaattgatatcaatataatgaaaatatcaaatatttgcatataaatataatcttaaagttcagtctatttaatgttcaatgaaatatttctgcctgtataatctttaaagatgttgaacatatattcacattaaatatgattatgtacttgttacaaggataaggttatatatgaataaagttacaaaaacagctattgcgggcttacttgcgcttttcgcaggtaatgccgctgcaaccgatggtgaaatagtttttgatggcgagattttaaaatccgcttgtgaaatcaatgactctgataagaaaattgaagttgctcttggtcactataatgccgaacagtttcgtaatattggcgagcgtagcccaaaaattccattcactattcctttagttaactgcccaatgactgggtgggagcacgataacggcaacgttgaagcgtctttccgtctatggctggaaacgcgagataatggcaccgtccctaacttccctaatctggcaaaagtaggctcttttgctggcatagcggcaacaggtgtgggtatccgtattgacgatgcggaaagcggaaacattatgccactgaatgctatgggcaatgataacacggtttatcagatcccggcggaatccaatggtattgtcaatgttgacctcatcgcttactacgtaagtaccgtagttccaagtgaaatcaccccaggggaagcagacgctatcgttaacgtaacgctggattaccgttaatacgttagggcgttatctgacctgtcagataacgcccttttccttcctctttctcgttgtatcaggttgaaaaataactatgagtaaacgaacattcgcggtgatattaaccttgttgtgtagcttctgtattggccaggcgcttgcaggaggaatcgttttacagcgaacgcgagtgatctatgatgccagccgcaaagaggctgcgttacctgtcgcaaacaaaggcgcagaaacgccttatttactgcaaagttgggtagataatatagatggtaaaagccgtgccccatttattataaccccaccgctatttcgtcttgaggctggcgatgacagtagtctgcgaattattaaaacagctgataacctgcctgaaaataaagagagcctgttctacattaatgttcgtgccattccagcaaagaaaaaaagtgatgatgttaatgctaacgagttgacgctggtatttaaaacacggatcaaaatgttttatcgccccgcacacctgaagggacgggtaaacgatgcgtggaaaagtctggaatttaaacgtagtgaccatagtctcaatatatataacccaactgaatattacgtcgtatttgccggactggcagtcgataaaaccgatctcacaagcaaaattgaatatatcgcgcccggagaacataaacagttaccacttcctgcatctggcggaaagaacgtgaaatgggctgcgatcaatgattatggcggcagttccgggacagaaactcgtccactgcaataaaaaatataaaaacacaggtcatcagggaatgccacaacgacaccaccagggacataaacgcacaccgaaacagttggcgctcatcatcaaacgttgtttgccgatggtgctcactggcagcggcatgctttgcactaccgctaacgccgaagagtattatttcgaccccattatgctggaaaccacaaaaagtggtatgcaaacaaccgatctgagccgttttagtaaaaaatatgcacaactaccaggaacttatcaggttgatatctggctgaataaaaagaaggttagtcagaaaaaaattacatttaccgccaatgcagagcaacttctgcagccacagtttacggtagaacaactacgtgagctgggtattaaggtggatgaaatcccggcgctggctgaaaaagatgacgatagcgtgatcaacagccttgaacaaatcattcccggtacagctgctgaatttgatttcaatcatcagcaacttaatttgagcattccccaaattgcactgtaccgtgatgcaagaggttacgtctccccttctcgttgggacgatggtataccaacgctgtttaccaactacagctttacaggttctgataaccgttaccgccagggcaatcgtagccaacgacagtacctgaatatgcaaaatggtgctaattttggcccctggcgattacgcaactattccacatggacacgcaacgatcagacaagtagctggaataccatcagtagttatttacaacgtgatatcaaggcgttgaagtctcagttgcttctgggagaaagcgccaccagcggcagtattttttccagctacacctttactggcgtgcaactcgcttccgacgataatatgttgccaaacagccagcgcggatttgccccaacggtacgcggtatcgcaaacagtagtgcaatcgtgactatcaggcaaaatggttatgtgatctatcaaagcaacgtgagtgcgggtgcctttgaaattaacgatctctacccctcttccaacagcggcgatttagaagtcacgattgaagaaagtgacggtacacaacgtcgctttatccagccttattctagtttacccatgatgcagcgacctgggcatctaaagtatagcgcgaccgctggacgctatcgcgctgatgcaaacagtgatagcaaggaacccgaatttgctgaagccacggcaatatatggtttgaataatacttttacgctgtatggcggcctgctcggttctgaagattattatgcgctggggatcggtatcggcggcacacttggcgcactgggcgcgttgagcatggatatcaacagagctgacacccaattcgataaccagcactcttttcatggctatcaatggcgtacgcagtacatcaaagatatcccggaaaccaacaccaatatcgctgtcagctactatcgctataccaacgatggctattttagttttaatgaagccaatacccgcaattgggactataacagtcgccaaaaaagtgaaattcaattcaacatcagccagacaatatttgatggggtaagtctgtatgcctccggtagccagcaagactattggggcaataacgataaaaacaggaatatctctgttggggtttccggccagcaatggggagttggttacagcctgaattatcaatacagccgctacactgatcaaaataatgaccgcgcactctctttgaatctcagtattccgttagaacgctggttaccgcgtagccgggtttcctatcagatgaccagccagaaagatcgcccaacccaacatgaaatgcgtcttgatggcagtctgctggatgatggtcgcctgagctatagcctggaacaaagtctggatgacgataacaaccataacagtagcctgaacgccagttaccgtagtccttatggcaccttcagtgccggatacagctacggtaatgacagcagccaatacaattacggcgttaccggcggcgtggttatccatcctcatggcgtgacgctcagccaatatctgggcaacgcttttgcgcttatcgatgctaacggagcatctggcgtgaggatacaaaactatccggggattgctaccgatccttttggctatgcagtggttccttatctcacaacttatcaggaaaaccgtctcagcgtagatactacgcagctgcccgataacgtcgatcttgaacaaacaacacagtttgtggtgcccaacagaggtgcaatggtagcggcgcgtttcaacgccaatatcggttatcgcgtacttgttacagtcagcgatcgcaacggtaaaccgttgccctttggcgctcttgccagcaacgatgatacggggcaacaaagtatcgtcgatgagggcggcatactatatctctctgggataagcagtaaaagtcaaagctggactgtacgctggggaaatcaggcagatcaacaatgtcagtttgctttcagtacaccggatagtgaacctacaacctctgtattacaaggcacagcgcagtgccattaaggataaaaaaatgaaaagagcgcctcttataacaggtcttttgttgatatccacatcctgcgcttatgcctccagtggagggtgtggagccgacagcactagcggtgcgacaaattacagcagtgtggttgatgatgttacggtgaaccagacagataacgtgacaggacgggagtttacctctgcaacgctaagtagcactaactggcaatacgcctgttcctgctctgcgggtaaggcagttaaacttgtctatatggtcagccccgtacttaccaccactggacatcagacaggatattacaaactcaatgacagcctggatattaaaaccacattacaggcaaacgacattccaggactcacaaccgaccaggttgtctctgttaacacccgattcacacagataaaaaacaacacggtatattctgctgcaacccaaacgggtgtttgccagggtgatacgtctcgttatggacccgttaatattggtgcgaacaccacctttaccctgtatgtcaccaagccatttctcggcagcatgaccattccgaaaacggatattgccgtcattaaaggcgcgtgggtcgatggaatgggaagcccgtctacaggtgacttccatgatttagtcaagttaagcattcagggaaatctcaccgccccacagagctgcaaaattaatcagggcgatgttattaaggttaattttggattcatcaatggtcagaagtttaccacccgcaatgccatgccagacggttttactccagtagactttgatatcacttatgactgtggtgatactagtaagattaaaaacagcttgcaaatgcgcatcgacggtacaactggggtagtagaccagtacaacctggtcgccaggcgaagaagtagtgacaatgtgcccgatgtcggtattcgtattgaaaatctcggcggcggagttgcaaatattccttttcagaacggtatccttcccgttgatccttccgggcatggcaccgtcaatatgcgcgcctggccagttaatctggtcggtggtgagctggaaacaggaaaatttcagggcacagccaccattaccgtcatcgtgcggtaaaagaagacgttgcgttttgattaacgcaacgcttcggcactgttacccctgctgctccagcgcatacttatacagcgcatttttcttcacgccgtgaatttctgcggccagcgccgccgcttttttcagcggcagttctgcctgtagcagcgccagcgtgcgcagggcatcggcgggtaagtcttcttcctgtgctttatgaccttcgacaatcagcaccatttcgcctttgcgacggttttcatcttcctttacccacgccagcagctcgccaacgggcgcgccgtgaatggtttcccaggttttggtcagctcacgcgccagaaccacgtagcgggattcgcctaataccgcaacgatatcttccaggctatctaacagacggtgggtagattcataaaaaatcagcgtgcgcggctccgcttcaatggcttttagcgcatcacggcggcctttacttttggcaggtaaaaagccttcgtaacagaaacggtcagagggtaaacccgctgcgcttaacgcagtgatagcagcacacggcccgggtagcggcaccacgcggatccccgcttcacggcaggtacgcaccagatggtagccaggatcgttaattagcggcgttccggcatcggaaaccagcgcaatgttttgcccctcttgcagcttcgccagcagcgtttcagctttttgttgttcgttatggtcgtgcagcgcaaacaaccgggcattaatcccaaaatgttgcagcaataaaccggtgtgacgagtatcctcggcggcaatcagatcaacggcctgtaatacctctaacgcacgctgggtgatatccgccagattgccgattggcgtcggtacaatgtaaagctggccctgagaattatccgcgctttggtgttgtttcattgtgtcgtccgtattgccgatttaatattgagcattgcgtaaaaaaaatatcactggatacattatggtacccagtacattttctcgtttgaaagccgcgcgttgtctgcctgttgttctggcagccctgattttcgccggttgtggcacccatactcccgatcagtccactgcttatatgcagggcacggcgcaggctgattctgccttttatcttcagcagatgcagcaaagctctgatgataccaggatcaactggcaattactcgccattcgtgcactggtgaaagaaggtaaaaccgggcaggcggttgagttgtttaaccaactaccgcaagaactgaacgatgctcagcgtcgcgagaaaacactgctggcggtagagattaaactggcgcagaaagattttgctggcgcgcaaaacttgctggcgaaaatcacacctgccgatttagaacaaaaccagcaagcgcgttactggcaggcaaaaatcgatgccagccaggggcgtccttccattgatttactgcgcgcgttaattgctcaggaaccgctgcttggcgcgaaagaaaaacagcagaatattgatgccacctggcaggcgctctcctccatgactcaggaacaggcgaatacgctggtgatcaacgccgacgaaaatattctgcaaggctggctggatctgcagcgcgtctggtttgataaccgtaacgatcccgacatgatgaaagccgggatcgccgactggcagaaacgttatccgaacaatccgggcgcgaaaatgctgccaacgcagttggttaacgtaaaagcgtttaaaccagccagcaccaacaaaatcgccctgctgttgccactgaatggccaggcagcggtatttggtcgcactattcagcaaggctttgaagcggcgaaaaatatcggcactcagccagtggcagctcaggtagctgccgcacctgccgcagacgtagctgaacaacctcagccgcaaaccgtggatggcgttgccagcccggcacaagccagcgttagcgatctgaccggtgaacagcctgcagcccagccggtgcctgtaagcgccccggcgacaagcaccgcagcggtaagcgcacccgcaaatccatccgcagagctgaaaatctacgataccagtagtcaaccacttagccagatcttaagccaggttcagcaggatggcgcgagtattgtggtcggtccgttgctgaaaaataacgttgaagagttgctgaagagcaacactccgctgaacgtactggcactgaaccagccggagaatatcgaaaatcgcgtcaatatttgttacttcgcgcttagtccggaagacgaagcgcgcgatgcagcgcgtcatattcgtgaccagggtaaacaagcgccgctggtgctgatcccacgcagtagtttgggcgatcgcgtagccaatgcgtttgcgcaagagtggcagaaactgggcggcggcaccgttctgcaacaaaaatttggttccaccagcgaattacgcgcgggtgttaacggcggttctggtattgctttaacgggtagcccgattactctcagagcgacaaccgactccggcatgacgaccaacaatccaacgctgcaaaccacgccaaccgatgaccagttcaccaataatggcggtcgtgtcgatgcggtgtacattgtggcaacgccgggtgaaatcgcttttatcaaaccgatgatcgccatgcgtaacggtagccagagcggtgcaacgctgtacgccagctcccgcagtgcgcaagggaccgctggcccggatttccgactggagatggaaggcttgcagtacagcgaaatcccgatgctggcaggcggtaatctaccgttaatgcagcaggcactcagcgcggtgaataacgattatagtctggctcgcatgtatgcgatgggcgtcgatgcctggagcctggcaaatcatttcagtcaaatgcgccaggttcagggttttgaaatcaacggtaataccggaagcctgacggctaacccggattgcgtgattaacaggaacttaagttggctacagtaccaacaaggtcaggtagtccccgtcagttaaattaagtgattaacaggaacttatcatggctacagtaccaacaaggagtggtagtccccgtcagttaaccaccaaacagaccggcgatgcgtgggaagcacaagcgcgtcgctggctggaaggcaaaggactgcggtttatcgccgctaacgtgaacgagcgtggcggcgagatcgatctgataatgcgtgaaggccggaccaccatttttgtcgaggtacgctatcgccgctctgcgctttatggcggcgcggcagccagtgtgacccgcagcaaacaacacaaattattacagactgcccgcttgtggctcgcgcgtcataatgggagttttgatactgtggattgccggttcgatgtggtagccttcaccgggaatgaggttgagtggattaaggatgcctttaatgaccacagttaattaaggtttaaggattagcgtgcaagaaagaattaaagcttgcttcactgaaagcattcaaactcaaattgcggcggcagaggcgcttccggatgccatctcccgtgcagccatgacgctggttcagtctctgctcaatggcaacaaaatcctctgttgtggtaatggaacttccgctgccaatgcacagcattttgctgccagcatgatcaaccgtttcgaaacggagcggcccagcttacctgccattgcactaaatactgataatgttgtcttaacggcgattgccaacgatcgcttacatgatgaagtgtatgcaaaacaggtgcgggcgctgggtcatgcgggagatgtattgttagccatttccacccgtggcaacagccgcgatattgttaaagcagttgaagccgccgttacgcgtgatatgaccattgtggcattgaccggctatgacggcggcgaacttgcaggtttgttagggccacaggatgtggagatccgcattcctagccatcgtagtgctcgcattcaggaaatgcatatgctgacggtaaattgcctgtgcgatctgatcgataacacgcttttccctcaccaggatgattaaggagaatacatgaaggcattaagcccaatcgcagtccttatttccgcgctgctgttgcaaggttgtgttgccgctgccgtagtgggtaccgctgctgtgggtaccaaagccgcaactgacccacgcagtgtcggcacccaggtggacgatggtaccctggaagtgcgcgtgaacagcgcattgagcaaagacgaacagattaagaaagaagcgcgcattaatgtaacggcctatcagggcaaagtgctgctggttgggcagagtccaaatgctgaacttagcgctcgcgccaaacagattgctatgggcgtagacggtgccaacgaagtgtataacgagattcgtcagggccagccgattggtctgggcgaagcatctaacgatacgtggatcaccaccaaagtgcgtagccagctcttaaccagcgacctggtgaaaagctccaacgtgaaagtgaccaccgaaaacggtgaagtgttcctgatggggctggtgactgaacgtgaagcgaaagcggcggcagatattgccagccgggtgagcggcgtgaagcgggtaactacggcgtttacgtttattaaataacagccccttgtaatgcctgatgcgacgcttgccgcgtcttatcaggcctacaacgatacaaaccgtaggtcagataaggcgtttacgccgcatccgacatgttttccctcaaatcagaacaacagcgccagcccgccgacaatcacaccagacactgccaccatcgcccctgtcagccataaggctttcgccgggaacgctttgcgcagcataatcagactcggcaaactcactgccgggagcgtcatcaacaatgccagcgccggagcggttcccatacctgccagcatcatcgtttgtacaatcggaatttctgctgccgtgggaatgacaaacaagcatcctgctaccgccatcgccaccacccacatcaggctgttatcgacagcaccatcggcatgggggaataaccagacgcgagcggcacccaacaccagtactgcaaggatgtaaaccgggatcgtactccagaaaagcgtccatagcgccctgccccagcggctaaaaaacccgccctgtgcttccggtatgtcaatttcgaccggtgcctgcgtttgcggtgtttcacgcacccatttttgcaccagcgtcgcaatcagcaacaccatcaccagcccggccaccagacgaatcgccgcaaaaccccagccgaggacaaagcccataaacaccagcgtcgccgggtttaacaccggattgcccatccagaatgccagcgcaccgcccatgctcacctgttggcgacgcattcccgccgcgaccggagccgcacagcaggtacacatcatgcccggcaagctaaacagcgttcccagcagcgtgccgcgaaagcggctttgcccaagcgtacgcaacaaccagtcacgcgggatcagcacctgaatcaagctaccgaggatcacccccagcaccgccgctttccataccgcgaggaaatagatcatcgcgtaatccaacgccgcctgccatgggttagcatccgcctgcgcaaggatagatttaccgatactgtgggtttcggcagcagtaaacgctttgccgtagtaaggttcccatttcacataccagagaccggcaatgacaacgagaaagaaaagcgcgggtttccaccactgaatgggcgttgccgcctgagaactagactgaccagtcatagcattccccaggaataagttatgataattgagcgcgtgaatattacgctcactatcaattcttgggaataattattcagctcttttgcgtaattcactagagcttaaaatcgtcacgccttcatgctcaggccgcatgctctctgccagcatgacccgcgccacgtctctcgcatcaatggatttccagttacctggtaacaaacggaacagcggcgcaaaaagcgtttcgttcatccgctgtttgctacgatcgcccagtaacatgctcgggcgagcaatggtcaatttcggccagttctgggcgattaatgcttcttccatctcccctttgacgcggttatagaaaaacgggctgtgggcattggcacccatcgcactgactaccaacatatgctgcgcgcccagtcgccgcccggttaatgcggtatccactaccagcgtgtaatcggcatgaataaacgcctctttgctccccgcttctcgccgcgtggtgccgagacaacaaaacacaatgtcgatgggatcggtgacctgcgccaacgcgtcactcagttgcggatcatggggattaaacaccccgggcatatcgcccaacggacgtcgcgtcggcgcagcaatggcgttaactttcggttcgttaatcaacatccgcagcaggtgaccgcccaccagccccgttgcgcctgtaatcagtacctgactcatcttcgctcctttacagaattgtctgccttgcgctccacggctcatgcaccaggcttaatagaccatgaggtaattatccccgattgtgggaaattcgcctcatccaatgcaacaacgcggaggaagcatgagtaagaaaattgccgttttaatcactgatgaatttgaggatagtgaatttactagtcccgcagacgagttccgtaaagccggacacgaagtgattaccattgaaaaacaagcgggtaaaacggtgaaaggcaaaaaaggagaagccagcgtgaccatcgataaatccatcgatgaagtgacgcctgcggagtttgatgccctgctgctaccgggcggccatagtccggattatctgcgtggggacaaccgttttgtcacctttacccgtgattttgtgaatagtggcaaaccggtgtttgccatctgtcacggcccgcagttgctgatcagcgccgatgtgattcgggggcgcaaactgaccgcagttaaaccgatcattattgatgttaaaaatgcgggcgcggaattttacgatcaggaagtcgtggttgataaagatcagctggttaccagccggacaccggacgatctgccagcgtttaaccgcgaggcgttacgcctgctcggtgcctgattacgcctgctcggtgccactgtcgcgtagccaaatcatttttttaccaaagcccagcgtgttgtcggtgaatttgatttcatcgagccggatttcccacaccggggcgctcagcattctggcaaccggaaagcgacgattgtacgccttgcgcgcgaggtcgctttcctcaccttccagcctgcggatctcacctttaaactgcacaccgcgaattaacgctaccgttttcggctgaccgtttaccgttccggcaaccgcagcctgcggcccactcatctgcgcgtggcgcgttttttcttccgtcaaaatgtagaaggcgactttctgcgcatcaaaaagataaaaggcattagcgcaccagagttccccttcctgctgcacacaccaagtgacaacatgttgttttgccagccaacggctgatggcgatgagtgtttccattgctgttctcttttatactgtgggcctgaccttaacatgcgacgcagacgatgacaccctggtttctttacttgatccgtaccgccgacaataagctttataccgggatcaccacggatgtcgaacgccgctatcagcagcaccaaagcggcaaaggggcgaaagcactgcgcgggaaaggagaactaacgctggtgttttccgcgccagtgggcgatcgtagcctggcgttacgggcggaatatcgcgttaagcaactgaccaaacggcaaaaagagcgtctggtagcggaaggcgcagggtttgcagagctgttaagcagtctgcaaaccccggagattaaaagcgattgaaatgctcgtgatactcaaccaggccggtaacgccattcagcgcgtcatccgctaaacgatgtacctggaaggcgctttcagtgcccggccagcggcaacgcagatcgtgatgcgccgccagttcaaagccgaaacgactgtacagcgccggatcgcccagcgtcaccactgcggcatagccgaactcattaaggctatcgagtccttcatagaccagttggcgtgccagcccctgtccacggtatttttcatcaaccgccaacggtgccatgccgacccattgcaggtcttcgccctgcacatcaaccggactaaatgccacatagccaatgacctgaccttcgtcatctgtcgccaccagccccagcgtcagaaagccatcttcacgcagatcgtgaaccagcttcgcttccgcatcactttcgaaactgcgacgcagcagggcatcaatacccggcgcatcaatgggaatttctactcgaattagcatggttcacctacgcttgtctgtttggtttcaggcgcggttttcattcccgcctcaacaaaatccgccagttgcagcagcatcatgcgtaaggctttcggcatttgctccagttcaatggcgtccatcaggtttttcacatacagccccagctccgtatcgccttcaatcaccagccgacgctggaagaagagcgtatccggatcttgtttacgcgccgcaatcatcagcagatcgctggcgtcggcactaaaactcacatcagcttgcgcgttctggctaacgaccagtttgccattcaccacgctggtaaaccattgcaggtcaatatcacgcacatgaatacttaaccagcggccttcaagaaactccagctcgccatcatccagcgcctggcggaattgccagcttaagacctgctcaagaacctggcgttttagcgcaaatggcgtcagttttaccggtacactcaacagagatggccccaaatgcacaatacgggaacgcagtttatccaacacgagttttactccctgtttcaacaatcatcctattttgccatatcagaaaaataacatagcggtataaatcaacaattccatatgaaattgctgctaccaccaatacaactttaactgccttaaatcaaaaattgtcgcagcaaggttaactaaaatcccagttcgttaacatttttgcgttttgatagcgcaaccttcaggaaaaattatggagctgctctgccctgccggaaatctcccggcgcttaaggcggccatcgaaaacggcgcagatgctgtttatatcgggctaaaagatgataccaatgcccgtcacttcgccggccttaactttaccgagaaaaaattgcaggaagcggtgagttttgtccatcaacatcgccgcaaacttcacatcgcgattaacacttttgcgcatccggacggttacgcccgttggcagcgcgccgtggatatggcggcgcagctgggtgccgacgcgctgatcctcgccgacctcgccatgctggagtacgccgccgagcgttatccgcatattgagcgccacgtaagcgtgcaggctagcgcgaccaatgaagaggcgattaacttttatcatcgccattttgacgttgctcgcgtggtgctgccgcgcgtgttgagcattcatcaggtgaaacaactggcacgggtcacacctgtaccactggaagtctttgctttcggcagcctgtgcattatgagcgaaggtcgttgctatctgagcagctatctgacgggtgagagccccaacaccataggcgcgtgttctccggcccgtttcgtgcgctggcaacaaacgccgcaggggctggaatcccgcctgaacgaagtgctgatcgaccgttatcaggacggcgaaaacgcaggttatccgacgctatgtaaagggcgttatctggtggacggcgagcgctatcacgcgctggaagaaccaaccagtctcaataccctggaactgctgccggagttaatggcggcgaatattgctagcgtgaaaattgaaggccgccagcgtagcccggcgtatgtcagccaggtggcgaaagtctggcgtcaggctatcgaccgttgtaaggccgatccgcaaaactttgtaccgcaaagcgcgtggatggagacgctcgggagcatgtccgaaggcacgcaaaccactcttggcgcatatcaccgtaaatggcagtgagaaaagcaatgaaatattccttagggccagtgctgtggtactggccaaaagagacgctggaagaattttatcagcaggccgccaccagcagcgccgacgtgatttatcttggtgaagcggtatgcagcaagcgtcgggcaaccaaagttggcgactggctggagatggcaaaaagcctcgccgggagtggtaagcagattgtgctctccacgctggcgctggtgcaggcaagttctgaactgggcgaactgaaacgctatgttgagaacggtgagtttctgattgaagccagcgatctcggcgtggtgaatatgtgcgctgaacgcaaactgccgttcgtcgccgggcacgcgctgaactgctacaacgcggtgacactgaaaatattgctcaaacagggcatgatgcgctggtgtatgccagtggagctttcccgcgactggctggtgaatctgcttaatcagtgcgatgagctgggcattcgtaaccagtttgaagtggaagtcctgagctacggtcatctgccgctggcctactccgcccgctgctttaccgcgcgtagcgaagaccgcccgaaagatgagtgtgaaacctgctgcattaagtatccgaacgggcgcaacgtgctgagccaggaaaaccaacaagtgtttgtactcaatggcattcagaccatgagcggctacgtttacaacctcggtaacgagctggcatccatgcagggcctggttgatgtggtccgcctgagtccgcagggtactgacactttcgcgatgctcgacgccttccgcgctaatgaaaatggcgctgcaccactgccgttgacggcgaacagcgactgtaacggctactggcggcggctggcaggactggagctgcaagcctaagtaaatagctcactttgttaacaactttaactactctttaatgcagtattaaagattaatcggtaacaaagtgagctgttatgactgataaaaccattgcgtttagcctactcgatctggcccccattcccgaaggttctagtgcgcgagaagcattctcccactctctcgatctcgcccgtctggctgaaaagcgcggctatcatcgctactggctggcagaacaccacaatatgactggcattgccagtgctgccacgagcgtattgatcggctatctggcggcgaataccaccacgctgcatctggggtctggcggcgtgatgttgcctaaccacagtccgttggtcattgcagaacagttcggcacgcttaatacactctatccggggcgaatcgatttggggctgggtcgtgctccgggtagtgaccaacggacaatgatggcgctacgtcgtcatatgagcggcgatattgataatttcccccgcgatgtggcggagctggtggactggtttgacgcccgcgatcccaatccgcatgtgcgcccggtaccaggctatggcgagaaaatccccgtgtggttgttaggctccagcctttacagcgcgcaactggcggcgcagcttggtctgccgtttgcgtttgccagtcacttcgcgccggatatgctgttccaggcgctgcatctttatcgcagcaacttcaaaccgagtgcacggctggaaaaaccatacgcgatggtgtgcatcaatattatcgccgccgacagcaaccgcgacgctgaatttctgtttaccagtatgcagcaagcctttgtgaagctgcgccgtggcgaaaccgggcaactgccgccgccgattcaaaatatggatcagttctggagtccgtctgagcagtatggcgtgcagcaggcgctgagtatgagcttggtaggtgataaagcgaaagtgcgtcatggcttgcagagcatcctgcgcgaaaccgacgccgatgagattatggtcaacgggcagattttcgaccaccaggcgcggctgcatagctttgagctggcgatggatgttaaggaagagttgttgggataatgtgtcttaacgcgggaagccttatccgagctggcaacgctgtcctacatagacctgataagcgaagcgcatcaggcattgtgtaggcagcagaaatgtcggataaggcaccgctgattactgatacaccggcagtaaattaaagctgcttaaaatatgcaccagtgcgttgccgacgccaaacaccagaatcagcgcaatcatcggcttgccaccccagacgcggaatttcgggctgccaaagcgtttacggcttgcacgggctaacagcgccggaacaattgccgcccagatggtagccgctaaaccagcataaccaatggcgtacaggaatccgttcgggaacaacagcccccccacaactggcggggcaaaggtcagcaatgccgttttcaagcggcccacagcgctgtcgtcgaaaccaaacagatctgccagatagtcaaacaaacccagcgttacgccgaggaagctactcgctaccgcaaagttactgaacacgaccagcagcagatccagactacggctgttcagtacgccgcttaacgcctgtaccagcacatcaatattaccgcccttctctgcaataccgataaactccggacgcgggatgttacccatcgtcgccagcaaccagatggtatacagcgccagcgccatcagcgtaccgtacaccagatatttcacgatggttttcggatctttgccgtaatacttcatcaggcttggcacgttaccgtgataaccaaagcttgccagacagaacggcagggtcatcaacagatacggtgcataagacgcattgctttcggcgacgttgaacaatgtcgcaggctgcacatgccccagcaggctaccaaaggtgaggaagaaggtaatgactttcgcccccagcacaatcgctgtcatgcgactgacggctttagtgctcaaccacaccacaaacgctaccagcaatgcaaaaccaaaacccgccgcccgtgccgggacgtttagactcatctctgcgaaggtgtgatgcagaatgctaccactggcagaaatataggcataggtcaggatatagagcacaaaggcaatggaaatgccgttgaccacgttccagcctttgcccagcaaatctttggtgatggtgtcaaaactgctaccgattctgtaattcaggttagcttccagaatcatcaagccggaatgcagcatacagaaccaggtaaagatcagcgccgccatactccagaaaaaccacgccccggacatgaccactggcagagaaaacatccctgcgccaataatggtgccgccgataatcaccacgccgccaagcaggctcggactcgtttgggtggtggttagtgttgccatgagggcttctctccagtgaaaaatagtgcgactgcgttgttatgcattgcactgtaccagtacacgagtacaaaagacagaaaaaaagccccgatggtaaaaatcggggctgtatatattattttacagattgtgttcgctgttcagcgatgattacgcatcaccaccgaaacgacgacgaccggtagaatcatcacgacgcggagcgcggccttcacgacgttcgccgctaaaacgacgaccatcaccacggccaccttcacggcgttcaccgctgaagttacgaccgccttcacgacgttcgccaccgaaaccacgaccaccgccacgacgctcaccgccagtatgcggctgtgcatcgcccagtaactgcatgttcatcggcttgttgagaatgcgagtgcgcgtaaagtgttgcagcacttcacccggcatacctttcggcagttcgatggtggagtgagaagcaaacagcttgatgttaccaatgtaacggctgctgatgtcgccttcgttagcaatcgcaccaacgatatgacgaacttcaacaccatcatcgcggcccacttcaatgcggtacagctgcatatcgccaacatcacgacgttcacgacgcggacgatcttcacggtcaccacgcgggccacggtcgttacgatcgcgcggaccacggtcatcacggtcacggaattcacgtttcggacgcatcggcgcatctggcggtacgatcagagtacgttcaccctgtgccattttcagcagtgccgcagccagagtttcgagatccagctcttcaccttcagcagtcggctgaattttgctcagcagtgcgcggtattgatccagatcgctgctttccagctgctgctgtactttagcggcgaatttttccagacggcgtttgcctagcagttctgcgttcggcagttctacttccggaatagtcagcttcatagtacgttcaatgttgcgcagcagacgacgctcgcggttctcaacgaacagcagcgcgcggccagcacgacccgcacgaccggtacgaccgatacggtgaacgtaagactcagaatccatcgggatatcgtagttaactaccaggctgatacgctcaacgtccaggccacgggctgcaacgtcggtcgcaatcaggatgtccagacgaccatctttcaggcgttccagtgtctgttcacgcagcgcctggttcatgtcaccgttcagcgcggcgctgttgtagccgttacgctcaagagcttcagccacttccagagtcgcgtttttggtacgaacgaagataatcgccgcatcaaaatcttccgcttccaggaaacgtaccagtgcttcgtttttgcgcataccccagacagtccagtagctctggctgatgtcaggacgggtagtcacgctggactgaatgcgcacttcctgcggctctttcataaagcggcgggtaatgcgacgaatcgcttccggcatggttgcagagaacagagcggtctgatgaccttccgggatctgcgccataatggtttcaacgtcttcgatgaagcccatgcgcagcatttcgtcagcttcatccagaaccagaccgctcagtttagagaggtccagagtgccacgtttcaggtggtccagcagacggcccggagtaccgacaacgatctgcggcccctgacgcagggcgcgtaattgcacgtcataacgctggccgccgtacagagcaaccacatttacgccgcgcatgtgtttagagaaatccgtcattgcttcagcaacctgtaccgccagttcgcgggtcggtgccagcaccagaatctgtggtgctttcagctcaggatcaagattctgcaacagaggtaaagagaatgctgcagtttttccgctccccgtctgggccatacccagaacgtcgcggccattcagcagatgtggaatacactctgcctgaattggagatggtttttcgtaacccagatcgttaagggcttcaaggataggagccttcaggcccagatctgcaaaagtggtttcgaattcagccatgtagtacgtgtgcctcaaaattaatggcggccagtctacataactcatcatgaaattgatcagcaattttcattgaaaagtgtgaaccggctcaaagtaggtgtattaacgaacaacaacgccctcacccgttaaggtgatggcaatcaaaaaagattacgggctgatgtgtacgtcagttattgctggtcgctttctgccaggtcatcttggtcctggcccaggaggcttaattccaacaatgcgtatcggtgctcaacaaagttatgaacgttgttggcaaccgccagtttgaacagtgccgtggcgctgtccaaatcccccagacttaggtagtacttacctaaatagaagttggtttcactgagatgctcagcgaggctggtgttatccgttgcgtccgccttgagcctttccattaacgtttgttcgctaatgttgcccaggtagaactcgacaatgttccatccccactgttccttatcgcttttttcgaagtgctgtttcaacacttctttagcctgcttctcatcgagcttctgctcggcgagataaagccacagactacggaaaggatcattgggatcgtcttgataaaacgccagcagatcatcttgcgctaacttgtcacgaccgccgtaatataatgcgatcccgcgattcaagtgcgcgtagttgtaagttggatcaagctcaagtacagaatcaaacgcttcataggcagcatcaaaattgcctgcctgcgttaaatatatgcctaagtaattgaatacttcaggcatatccggtcggattgccagcgcttggctaaaatcgttacgcgctaatgccctcagaccgagactatcatacaacactccgcgctcatataaaagctgtgcgcgttcgtcatcggttaaagcccgactggcaaggatttgttccatacgtgccagaatcacttcctgctgtaaagtcggttgcaatggtaccgcgaggacttcacttttacgccaggaagtattactgcatcctgcaagcgtaagtgctgtcgcaacgaaacaccagcgcaaaaaaggcttcatttcccactcccgaagaccacggttgaatgaacgtcctgttcccggttgctaacaaggcgtcctgcccggttaaaagccccccgccgcagcggagggcaaatggcaaccttactcgccctgttcagcagccggagcttccggtgctgcagcaggttgagactgctcagtcgcttctttaatgctcagacggatacggccctggcgatcaacttccagaactttcaccggtacttcctgacccatctgcaggtaatcggtcactttctcaacgcgtttgtcagcgatttgagagatgtggaccagaccttctttaccgccgccgatggcaacaaatgcgccaaagtcaacgatacgggtcactttaccagtgtagacgcggcccacttcgatttctgcagtgatctcttcgatacgacgaatagcatgtttcgctttctcgccgtcggtcgctgcaatcttcacagtaccgtcatcttcgatttcgatggtggtgccagtttcttcggtcagagcacggattacagaaccgcctttaccgataacatctttgatcttgtccgggttgatcttgatggtatggatacgcggtgcgaactcagagatatcgccacgcggcgcgttgatcgcctgttccattacgcccaggatatgcagacgcgcacctttagcctggttcagcgcaacctgcatgatctctttggtgataccttcaattttgatatccatctgcagtgcagagataccgtcgcgggaacctgcaactttgaagtccatatcgcccaggtgatcttcgtcgcccaaaatgtcagacagtacaacgtagttgtcgccttctttcaccagacccattgcgatacccgcaacggcagctttgatcggcacacctgcgtccatcagcgccagagacgcgccgcacacggaagccatagaagaggaaccgttggattcagtgatttcagacacaacacgtacggtgtacgggaatttgtccatatccggcatgactgccagcacgccgcgcttcgccagacgaccgtgaccaatttcacgacgcttcggagaaccgaccatgccggtttcgcctacggagtacggagggaagttgtagtggaacaggaaggtatcggtacgttcgcccatcagttcatcaagaacctgcgcgtcacgagcagtacccagcgttgcggtaaccagcgcctgcgtttcaccacgggtgaacagcgcagaaccgtgagtacgcggcagcacgccagtacgcacatccagaccacggatcatatctttttcacgaccgtcgatacgcggttcgcctgccagtacgcggctacgaacaacgtttttctcgatcgcgtgcagaatttcacccagttcgttttcgtccagggtttcgtcttcagcaagcagcgtcgcgatggtttcagatttgatgacatcaacctgcgcataacgctcttgtttgtcggtgatgcggtaagcatcgctcaggcgagcttcagccagtgcagcaacgcgcgcgtttagcgcttcgtttaccggctccggctgccagtcccaacgcggtttaccggcttctttcaccagttcattgatgttctgaataacaacctgctgttgttcatgaccgaacactactgcgcccagcatctggtcttcgctcagcagttgagcttcagattcaaccatcagtacagcggcttcagtaccggcaacaaccagatccagtttgctctctttcagctcgtcctgagtcgggttcagtacgtactggtcattgatgtaacctacgcgggcagcaccaatcgggccattgaacggaataccagacagagacagcgctgcggaagcaccaatcatcgcgacgatatccgggttaacttgcgggttaacagaaaccacggtggcgataacctgaacttcgttgacgaagccttccgggaacagcgggcgaatcgggcggtcaatcagacgcgcgatcagggtttcgccttcgcttgggcggccttcacgacggaagaagctacccgggatacgaccagcagcgtaggtacgctcctgatagttaacggtcagtgggaagaagtcctgacctggtttggcttttttctggccaacaacggtaacgaataccgcggtgtcatccatgctaaccataacagcggcagtagcctgacgagccatcatgccggtttccagagtcacggtgtgttggccgtactggaatttacgaacgatcggattaagcaatgtaatatcctttctctttcttagacagtaccttacggcactggtgttaataccgcttcttctgcgcatcctcgcgactaatgacaaccctaacccagctctatgtgggtaaagcctctcattagccgcgcgaacctctgcaacggaagatcattcatagcaacaatacattagtttccagtgaattgctgccgtcagcttgaaaaaaggggccactcaggcccccttttctgaaactcgcaagaattagcgacgcagacccaggcgctcgatgagctgggtgtaacgtgctacgtctttacgtttcaggtagtcgagcagtttacgacgctgagaaaccatgcgcagcagaccacgacggctgtggtgatcttttttgtgctctgcaaagtggccctgcaggtggttgatctgtgcagtcagcagtgctacctgaacttcggtagaaccggtgtcgtttgcgtcacgaccaaactcagaaacgattttagctgttgcttcagtacttagagacattttaaaactccaaagtatatagaatgaaaggacgccgatctctaattcagcgatcccagtgtacgttacgcaaagtgttaaacaatttacgcgacgttaagcggcagtattctactcgtagcgacctgttatcgcaagacggttaacattacgccgggtattcaaccaccaggcgacgaggcgcaacgcggccttcatcgtcaatttcgcccataccgataaatttgccgttctcaccttccgtgacgcgaaccagtccttccagtggcgcaccagatgtacgaaccgggttaccatttttgaagtaaacagaagacgttaacggaagattcaccaccggatagtcgctagctggactgtccattggcatcagtaatggatcaagtaactccgcggctggaatatcctgctgttcagcttgctcaacaagttcacgcaggtgctccagggtcaccatccgttcaaccggatatttacttaccgccagacggcgcaggtaaataacatgcgcgccacagccgagtttttcacccaggtcatcaatgatggtgcggatataagtgcctttactgcagtgaatttccagctccagctcattgccttcatggcgaataaacagcaattcataaacggtaatcggacgcgcttcacgcggaacttcaatgccctgacgcgcatattcgtacagttttttgccctgatatttcagtgcactatacatgctagggatctgttcgatatcgccacggaaagtatccagtgccgctgccagctgctctgcgctaaaggttaccggacgttcttcaacgatctgtccgtcggcatcagaagtatcggtacgctgtccaagacgcgcaatgacccgatagcgtttgtcggagtccagcagatactgggaaaacttcgtcgcttccccgaggcaaatcggcaacatgccggtcgccagcgggtccagcgcaccggtatgcccggcacggttggcgttatatatacgtttcactttttgcagcgcatcgttgctggacataccctgaggtttatccagcaacaaaacgccgttaatgtcgcgaccgcgacgacgaggacgactcattagtcctccttgctgtcgtccgggttaacacgacgttcttcgtcatgtttgaccacgctggtcaccaggttactcatgcgcatcccttcaaccagagagttgtcgtagaagaaggtcagttccggcacgatacgcaggcgcatcgctttccccagcaggctgcggatgaaaccagaagcttcttgcaacgctttgatgcccgctttaaccgcgtcttcatctttgtcgttgaggaacgtcacatatactttggcatacgccaggtcgcgagacatttcgacaccggaaacggtggtcatcatgcccaggcgaggatctttaatttcacgctgcaggatgagagcgatctctttttgcatttcctgcgctacgcgctgcgggcgaccaaattctttcgccataataaattctcctgacaaaaaaggggctgttagcccctttttaaaattaatttcaggtggaagggctgttcacgttgacctgataagacgcgccagcgtcacatcaggcaatccatgccggatgcagcgtaaacgccttatcccgcatggaaccctaaaaaccttaagcaatggtacgttggatctcgatgatttcgaatacttcgatcacatcgccagtgcggacgtcgttgtagttcttaacgccgataccacattccataccgttacggacttcgttaacgtcatctttgaagcggcgcagggactccagctcgccttcgtagataaccacgttgtcacgcagaacgcggatcgggttgtgacgtttaaccacaccttcggtaaccatacagcctgcgatggcaccaaatttcgggcttttgaacacgtcacgaacttccgccagaccgataatctgctgtttcagttccggagacagcataccgctcatcgccgctttcacttcgtcaatcaggttatagatgacggagtagtaacgcagatccaggctttccgcttcaatcactttacgtgcagaggcatcagcacgtacgttaaagccaaccaggatggcgttggacgccgcagccagggtggcgtcggtttcggtgataccacctacgccagaaccgatgatcttcactttaacttcgtcagtagacagtttcagcaaggagtcggagatcgcttcgacagaaccctgtacgtctgccttcaggacgatattcacttcgtgaacttcgccttcggtcatgttggcgaacatgttctcgagtttagatttctgctgacgcgccagtttaacttcgcggaatttaccctgacgatagagtgcaacttcacgcgctttcttctcgtcacgtacaacggtaacttcatcacccgcagccggtacgccggacaggccgaggatttccaccggaatggacggacccgcttccagcacttcctgacccagttcgttacgcatcgcacgaacacgaccgtattcgaagccacacagaacgatatcgcccttgtgcagagtaccttcacgtaccagaacggtagcaaccggaccacgacctttatcgaggaaggattcgataaccgcaccgctcgccatacctttacgtaccgctttcagctccagaacttccgcctgcagcaggatagcgtccagcagttcatcgataccggtacccgctttcgcagatacgtgtacgaactggctttcaccgccccactcttccggcaggatgccgtactgggagagttcgttcttaacgcgatccggatcagcttctggtttatcgatcttgttcactgcaaccaccaccggtacctgcgccgctttcgcgtgctggattgcttcgatggtctgcggcatcacaccgtcgtcggcagcaacaaccaggactacgatgtccgttgcctgcgcaccacgagcacgcatactagtaaacgcggcgtgccccggggtgtccaggaaggtgatcatgccgttttcagtttcaacgtggtatgcaccaatgtgctgggtaatgccgcccgcttcgccagaggccactttcgtactacgaatgtagtccagcagagaggttttaccgtggtcaacgtgacccatgatggtcacaaccggcgcgcgcggttcagccgcagcacccgtgtcacggtcgctcattaccgcctcttccagctcgttttcacgacgcaggataactttatggcccatctcttcagcaaccagctgtgcggtttcctgatcgataacctggttgatggttgccattgcgcccagtttcatcatcgctttgatgacctgagagcctttaaccgccatcttgttcgccagttcgccaacggtgatagtttcgccgatcacaacgtcacggttaacggcctgagcaggcttctggaagccttgctgcaggctagaacctttacgttttccgcctttaccgccacgtactgctgcgcgtgcttcttcacgatcagctttactttcagcgtgtttgttgcctttcttcggacgcgctgctttcgcgttacgaccacggccacggccgccttcgacttcacgatcgctttcgtcttctgcctggcgagcatgttgagaagtagtgacgtgataatcgctggaatcttcagtcggttccgcgttatcagtccatttgttttcttccgccatacgacgtgcttcttcagcaacgcgacgtgcttcttcttcgagtttacgacgcgcttcttcttcagctttacgcttgagctctgcagcttcctgctcacggcgggctttttcagcctgggcgtttttagtcatatcgtcttgttgattgctcactttgtctttttccgcagcttcacgtttcgcttgttcagcagcttcacgcttagcttgttctgcggcctcacgttcagctttttgttgcgcctcgcgtttagcgctttcttctgcctcacgacgggcttgctcttccgcttcacgctgcgcttgctcttccgctgcaaggcgttcagcctcttgcggatcgcgtttcacaaaggtgcgtttcttgcggacttcgatttgtacgcttttgctttttccaccggtaccaggaatgttaagggtgctgcgtgttttacgttgcagcgtcaatttgtccgggccactatttttctgattcaggtggtcaatcaaagtctgtttctcttgtgcagacacagagtcgtcagcagacttccggatacctgcatcagcaaattgctgtaccaggcgttccacggaggtctgtcgctctgcggccagcgttttaatcgttacatctgtcatgctgttccttcctgctacagtttattacgcttcgtcaccgaaccagcaaatattacgggcagccataatcagtgctccggctttttcgtcggtcaacccttcgatatcagccagatcatcaatgccctgttcggcgagatcttccagcgtacaaacgccacgggcggccagtttgaatgccaaatcacgatctaccccttcaaggttcagcagatcgtcagccggtttgttatcaccgaggctttcttcctgggcctgtgcaatggtggccagtgcatttttagcacgctcgcgcagtgcttcaacggtcggctcatcaaggccttcgatttccaacagctctttcatcggcacataggccaattcttccagcgtgctgaagccttcttctaccagaacagtcgcgaagtcttcgtcgatgtcgagatatttggtgaaggtgtcgatcgctgcgtgcgcttccgcctgatgcttagcctgcaggtcgtcaacggtcatcacgttgagttcccaaccgctcagctggctagccagacgcacgttctgaccgttacggccaatcgcctgcgccaggttaccggcttcaacggcgatatccatggtgtgtttatcttcatccaccacgatagaagcaacgtctgccggtgccattgcgttaatcacgaactgcgccgggttatcatcccacaggacgatatcgatacgctcgccacccagttcagtagacaccgcctgaacacgcgcgccacgcatacctacgcaagcacctaccggatcgatacgtttatcgttggttttcaccgcgattttcgcacgagaacccggatcgcgagccgctgctttaatttcaatcacttcttcgccgatttctggcacttcaatacggaacagttcgatcagcatttccggcttggaacgagtgacgaacagttgcgcgccacgcgcttccgggcgaacggaatagagcacgccacgaacgcggtcgccagggcggaagttttcacgcggcagcatatcttcgcgcaggatcacggcttcagcgttgttgcccagatccagagagatgttgtcgcggtttacttttttcaccacgccggtgatgatttcaccttcgtgttcacggaactgatcaaccaccatcgcacgttcggcttcacgcactttctgcacgataacctgttttgccgtctgggtagtgatacggtcaaaggtaacagactcaatctgatcttcaacgtaatcgcccaggttcaggctttcatcttcataacgtgcggcttcaagggtgatttccttggtcggctgggtgacttcatcaacaactaaccagcgacggaaagtgtcaaaatcaccgcttttgcgatcgatctgtacgcggacgtcgatctcttgttcatattttttctttgttgctgtcgccagcgcgctttccaatgcttcgaaaatcttctcgcgaggtagcgccttttcattggatacggcttcaactacagccaaaatttctttgttcatcgcgggcttttcacctcatccagactattaaaagtggggaaccaggttcgccttctggatattactcagcgcgaacacttcatctttaccttcgacggtaactgtgatcatttcaccgtctaccgctttgataacgccctgccatttacgacggttttgtaccgccatacggagaaccagagtcacctcttctccgacaaaacgggcgtagtgttcagccgtgaacagtgggcgatcgagacccggactggagacttccaggttataagcaacggtgatgggatcttcaacatccagcacagcacttacctggtggctcacatcagcacaatcatcaacattgatgccatcttcactatcaatatagatgcgcagtgtggatgtgcgaccgcgaataaattcgatgccaaccagttcaaaacccagggcctcaactggcgcagtaatcatctctgttaatttttgctctaatgtggacaagcccacccccaagacataaaaaaagggcctaaagcccagttattctgtagtcagataacaaaaaaccccgataaatcggggctttatataactgaaccctataaccgcaactgcggtctggagcactttccagaaggattttttcaaatcccactacgaaggccgaagtcttcacagtatatttgaaaaaggactctaagggaaagtggttgcgggggccggatttgaaccgacgatcttcgggttatgagcccgacgagctaccaggctgctccaccccgcgcctgaaacgtggcaaattctactcgttttgggtaaaaaatgcaaatactgctgggatttggtgtaccgagacgggacgtaaaatctgcaggcattatagtgatccacgccacattttgtcaacgtttattgctaatcatgtgaatgaatatccagttcactttcatttgttgaatacttttgccttctcctgctctcccttaagcgcattattttacaaaaaacacactaaactcttcctgtctccgataaaagatgattaaatgaaaactcatttattttgcataaaaattcagtgagagcggaaatccaggctcatcatcagttaattaagcagggtgttattttatgacgacgattctcaagcatctcccggtaggtcaacgtattggtatcgctttttctggcggtctggacaccagtgccgcactgctgtggatgcgacaaaagggagcggttccttatgcatatactgcaaacctgggccagccagacgaagaggattatgatgcgatccctcgtcgtgccatggaatacggcgcggagaacgcacgtctgatcgactgccgcaaacaactggtggccgaaggtattgccgctattcagtgtggcgcatttcataacaccaccggcggcctgacctatttcaacacgacgccgctgggccgcgccgtgactggtaccatgctggttgctgcgatgaaagaagatggcgtgaatatctggggtgacggtagcacctacaaaggaaacgatatcgaacgtttctatcgttatggtctgctgaccaatgctgaactgcagatttacaaaccgtggcttgatactgactttattgatgaactgggcggccgtcatgagatgtctgaatttatgattgcctgcggtttcgactacaaaatgtctgtcgaaaaagcctactccacagactccaacatgcttggtgcaacgcatgaagcgaaggatctggaatacctcaactccagcgtcaaaatcgtcaacccgattatgggcgtgaaattctgggatgagagcgtgaagatcccggcagaagaagtcacagtacgctttgaacaaggtcatccggtggcgctgaacggtaaaacctttagcgacgacgtagaaatgatgctggaagctaaccgcatcggcggtcgtcacggcctgggcatgagcgaccagattgaaaaccgtatcatcgaagcgaaaagccgtggtatttacgaagctccggggatggcactgctgcacattgcgtatgaacgcctgttgaccggtattcacaacgaagacaccattgagcagtatcacgcgcatggtcgtcagttgggccgtctgctgtaccaggggcgttggtttgactcccaggcgctgatgctgcgtgactctctgcaacgctgggttgccagccagatcactggtgaagttaccctggagctgcgccgtgggaacgattatagtatcctgaataccgtcagtgagaacctgacctacaagccagagcgtctgacgatggaaaaaggcgacagcgtgttcagcccagatgatcgtattggtcaattgaccatgcgtaacctggatatcactgatacccgcgagaaacttttcggttatgccaaaactggcctgctttcctcctctgccgctagtggcgtgccgcaggtggagaatctggaaaacaaaggccagtaattcgacatcaaccctgcccttcaggggtggggttaccttgcttatcctctgtaaactcctttctgagcatcacataatcgaaaacatcatggtttgcatccacaacccgactgtctcctttatagtgtgcaatcacttcctcaagcgtttgcggctgttccggctttgttacccccatccacgcattaataaggtaattattgtaagctgtgctaaagatgttgttttccgttgtgcgatccacgccatccccaagaacggggctataccagataaacatcgggacatgatatgcctgctggctagcctccctgcctccatgaaaatagacgttcttcttcgtagggtcacgttccaggccgtggtcggcaaaatacatgacgctggcgcggcgatcttttaataattcaaaaacctgacctagcaaactatctgtgtaatgaatggagttgtcatagcaggcatcctgatcgtcctgcggttgaaacacggcgctggattgcggataggcgctacaagccggttcatggcttccatttaaatgaagaacaatcagtttcttttgctgcgtattttgctgtaatgcttggcttaaatgcggcaacaacaattcatcaaatcctctgacataaactgtttccatggcgcgcatggcgatactggtaactgctgtaccattctgccgaaaagcggattggctgcttagccagaaagtctgaaatcctgcttgattagccatattaataatgttgtcggggtaattatgaatgtcatgactcaaaacagaatcagcagttaaagaaaggggaacgctcagcgcagtgtaaggtgcgccgcttattgcttgattaaacagtttgatctgttttctttgtgcttcaacttgcggtgtcgtagagcgtgtatatccatacaaagacatattgtcgacacgtacagactcccccacaatcaacacgtaggtatcaatacctgtatccctgacacttaattgaaaatacggcaccgtgtttgcaatactgagtaatctttgatgctctttcgctgctaaagcaaaatagttgagattgaaaaacggcgtataggtagcaaatcggctcgctagtatatatggactgaacgcttttttattttttgcatctttataagcaaattgacaagcggaaaataaactgccgctaatgacaatcagcaataatattcctgtcactttttttgtcggcaaggaaacatcatattttattattactgccaaaaaaagaagggataaaaaagcaaaggcacatagataagggatatacatccccagcattttgacaacttcatccggatcactctggagcacactaatcgcaaatccatcattgaaagttgtaccaaaggtacaccaactatagaggctaatactcatgtctgccgcagtcagtaacacaaatggtgcggcaacaagcaggcgaagcggaagggaacttatacgttttacaaccaggatggtcagaacgaagaacagcaagcgctgaaccatatgcgctccggaagaagcgactaagttcgtaataccaaaaacaataacacaaagatacaacaaccaatgagatttaaaagttctagcaaatttgttgaatactgtcatccagaaatccaagttcacaaccaatataaacaattatcaacaatgtttaattttatatcagacatgtttttcaactctgatccatatcagaacgaaacactgttagttttttctttttaaatgatgcggccattgcgttctcagtaattaaataacattatcaatgcgtctctaaacattacgcagaacgtagccatcagtcgttatactgacaggagcaggatggtttatcgagaagtaaacatatccgtattcgtaccggaactggagttgacacaataaagtgccaattatgtcagtagaagggaaaaatttataactaaggcgtaccggcaccatcgtttcaaggtaccagctacgagtaaagcaactggacgagatacagatacctgacaaccattcctcagaccaggaccaaaacgaaaaaagacgcttttcagcgtctcttttctggaatttggtaccgaggacgggacttgaacccgtaagccctattgggcactaccacctcaaggtagcgtgtctaccaattccaccacctcggcacggatactactttttagttcgggatatcgctggtcggcttagccggagcagctggctgagtttgttcggttttcgccggtgcactcagattttcccattcgctacctttattggttttgttgctattgatgttacccagcaccagactgatgatgaagaataacgttgccagcagcgccgtcatgcgggtcatgaagttaccagaaccactactaccaaacagcgtagcggaagcgcctgctccgaaggaggctcccatatcagcgcctttaccttgctgcagcatgatcagaccaacaaggccaattgccacaataaggaaaactactaaaagagcttcatacataatcaacctgttccttgcggagttgccgcgtaccaatgcttcaaccaataaagcgggagtttttaatctttcccactgaagcgggtgtgaatactaaccaaagcgaatgaccttcgcaagggcaattttatcgcattgtatcaactgcggaaaaaaacagcaaaaccgatgtgttcgctgagaaaaaaggcgacaatcgccgcctttttagccagttatctaacgctttaaacggcttttactgcatcggcgatgcggtgtgcaaattcagtcacctgcgcttcgtcttcgccttccaccatcacgcgaattaacggttcggtgccggatttacgcagcaacacgcgtccacggttgcccagcgcagcttcaacctctgcggtcacggctttaacactctcatgctcaagtggatcgccgctacctgcggtgtaacgtacgttaaccagaatctgcgggaacattttcatgccgctgcaaaggtcgtgcaggctcatatggttacgtgccatcgccgccagcacctgcaagccagcaacgatgccgtcaccggtagtagttttatccagcaggatcacatgaccggaattctctgcaccgatacgccagcctttctcctgcattttttccagtacgtagcggtcacccactttcgcgcgcgcaaatggaattcctaactgtttcagcgccagttcaagccccatgttgctcatcaatgtacccacagcgccaccacgcagctggccctgacgaagaccttcacgcgcgatgatatacatgatctgatcgccatcgactttattgccttcatggtcaaccataatcacgcgatcgccatcgccgtcgaaggcaataccgagatccgctttttcagccagcacacgagcctggagcgcgcgaacgtcggtagcccccacttcggcattgatgtttacaccgtttggctcacaaccgatagcgataacgttcgcccccagttcgcgcagcacgttcggcgcgatgtgataagtcgcaccgtttgcacaatccaccacaatcttcagttcactgaggctaagttcgttcgggaacgtggctttgcaaaactcgatatagcgacccgcggcatcaacgatacggctggctttacccagttctgcgctatcaacgcagctgatctccttttccatttccgcttcgatggcctcttctaccgcatccggcagtttggtgccgtcgatagagaagaatttaatgccattatcgtagaacgggttatggcttgcagatatcacaattccggcctctgcgcggaaggtacgcgtcagataagccacggccggtgttggcatcgggccagtgaagagtgcggaaaggcccgctgccgccagacccgcttccagtgcactctccagcatatagccagaaatacgcgtgtctttaccaataataatcttacgggagccgtggcgcgccagcactttacccgcggcccaacccagcttaagcacaaaatcaggtgtgatcggcgcatcccctacacgaccacgaatcccatcggtaccgaaatatttacgattactcatagcgtttgttttcctttgcagacagagtggcttccaccacccgcatcgcttctacggtttctttgacgtcatgaacacgaatgatgtgcgcgccttgcattgcggcaatgaccgcacaggccagactaccgctcaggcgctcggacggccccacgttcagcagctgcccaatcatgctttttcgactcatacccaccaacagcggcaggttgaaatggtgaaattcagccaggcgcgccagtaaactatagttatgggagagatttttaccgaaaccgaatccggggtcgagcaacaatttctcttttgcgatacccgcctgctcgcaacgtgctatttgctcaataaagtagcgattcacttctgcaaagacatcgtcatacttcggagcttcctgcatggtttttggatttccctgcatatgcatcagacaaaccggtaaaccggtttctgcagccgcctccagagcgccaggttcggaaagggagcggatatcattaataatgtgagcgccaactttcgcactctcacggatgacttctggtttggatgtatcgacactgatccagacttcgaagcgttgagcaattgcctcaaccacaggaataacacgttgcaactcttcttcaacgctaacttccgccgcccctgggcgcgtggactcgccaccaacgtcaatgatcgtcgcgccagcgttgatcatcagattcgcatgtttcaccgcatctatcaggctgttatgcgtgccaccatcgctaaaggaatcaggcgtgacgttgaggatccccattacgtgaggatggctaaggtccagactagtaccctgggcaaagagtttcatgatgttatccctggtatgaattgataagaaaaaaccccggagcacgccccggggttttcggtacaaatacagtcatctgatgcgggaacttacttgtcgcctaactgctcactcatggtgttacccgggttcggcgtacgcggttcatcaaccggacgaggagcctttggactaccattgtcgccagaattgttagaagcgcctggttcttcccagcccgctggcggacgtacatcgcgacgtgccatcaggtcatcaatctgcggtgcgtcgatagtctcatatttcatgagagcatctttcatcgcatgcagaatatccatattgtcggtcagaagctgacgcgcacgattatagttacgctcaatcagtgctttcacttcctggtcgatgatacgtgcagtttcatcggacatatgtttcgctttcgctacgctacggccgaggaacacttcaccttcttcttccgcgtacagcagtggacccaatttctcagagaagccccactgagtcaccatgttacgtgccaggttggtcgcaactttaatatcgttggacgcaccggtagatacatgttccggcccgtagatgatctcttctgccagacgaccaccgtacagcgtagaaatctggctttccagtttctgacggctggcgctgattgcgtcgccctcaggcaagaagaaagtcacacccagcgcacgaccgcgtgggataatcgtcactttgtgcaccggatcgtgttccggcaccaggcgaccgataatcgcatgacccgcttcgtggtaagccgtgctttctttctgcgcttccgtcatcaccatggagcgacgttccgcacccatcatgattttgtctttcgctttctcgaactcaaccatgctcacaacgcgtttgttgccacgagcagcgaacagtgccgcttcgttcaccaggttcgccaggtcagcaccggagaaaccaggagtaccacgggcaatgattgccgcgtcgatatcgggtgccaatggtacgcgacgcatgtgaactttcaggatctgctcacgaccgcgaacatctggcaagccgaccacaacctgacggtcgaaacggccaggacgcagcagggccgggtcgagaacgtccggacggttagtcgcggcgataacgatgataccttcgttaccttcgaagccatccatctcaaccagcatctggttcagagtctgttcacgttcatcgtgaccaccgcccagaccagcgccacgctggcggcctacggcgtcgatttcatcgataaagatgatgcacggtgccgctttcttcgcctgttcgaacatgtcacgaacacgggatgcacccacaccgacgaacatttctacgaagtcagaaccggagatagtaaagaacggaactttcgcttcgcctgcaatcgctttcgccagcagcgttttaccggtacccggaggaccgaccatcaagacgcctttcgggatcttaccgccgagtttctggaagcggctcggctcgcgcagatactcaaccagttcagcaacttcttcttttgcttcgtcgcagcccgcaacgtcagcaaaggtcgttttgatctgatcttccgtcagcatgcgcgctttgctcttaccaaagctcatggcacctttgccaccgccgccctgcatttgacgcatgaagaagatccagacaccaatcagcaacagcatcgggaaccaggagatgaagatagaagccagcaggcttggttcttcaggcggttcaccgacaaccttgacgttcttggtcaacaggttatccagtaatttcggatcctgaaccggaatgtaagtggtataacggttactatctttcttggtaacgttgatttcacgtccgttgatacgcgcttcacgaacctggtcgttattgacctcttgtaggaaggtagagtaatccaccttacggccattagactcgctgggcccaaagctctggaatacactcatcagcacaacggcaatgaccagccagagtattaggtttttcgccatgtcactcaagggattaacctcttattacaactgtgttaaaaacagcgtcaggatactctatatccagcatctttcaaactttcgtctgaaatctcccggttagggtttacgcccggtcgctacaatatacacttcccggctacgtgcacgagaagagtccagcttacgaactttgaccttcgtaaacagggagcgaatttcccttagatactcatcgaaaccttcgccctggaacaccttcactacaaaactgccacctggcgctaatacatcacgacacatttctagcgccagttccaccagatacatggcacgggggatatccaccgccggtgttccgctcatgtttggtgccatatcggacatgacaacctggactttgctgtcgccaacgcgctccagcagtgctttcatcaccagttcatcacgaaaatcgccctgaagaaagtccacaccaacgataggatccataggtaaaagatcgcaagcgatgatgcggcctttgccgccaatttgggtgaccacatattgactccaaccacccggagcagcaccaaggtcgacaaccgtcattcccggtttaaagagtttgtcactttgctgtatttcatcaagtttaaaccaggcacgggaacgtaacccctttttctgtgcctgttgaacatatttatcgctaaagtgttcctgaagccagcggctggagctggcagaacgcttcttacctgtcatttaactttcccatggggataactcatcgtaaccaattgcgtaaatttttacgcgcctatttggtgatatatgggagatggcggtagaatgacccgttttcaatcccaacgtaagcaaaaaatacgatgaatctgagtactaaacaaaaacagcacctgaaaggtctggcacatccgctcaagccagttgttctgcttggcagtaatggtttgaccgaaggggtgctggccgagattgaacaagcgttagagcaccatgaactcatcaaggtgaaaatcgccaccgaagatcgcgaaactaaaaccttgatcgtggaagctatcgtgcgcgaaaccggcgcctgtaatgtacaggtcatcggtaaaacgctggtgctttatcgcccaactaaagaacgtaaaatcagcctgccacgctaagattatcctaaagttacacacatttgctgtgtaaaacgaggggttttccgcaggcaggagagcaaaatgccacgctctgttcgttgataaaaggccgcatagcggcctttttcctttctttacaatacatcaacatcttgagtattgggtaattcttacaggtattccaccttaattacttcaaattctacttcgccgcccggcgttttgatgaccacaacatcatcttcttctttgccgatcaggccacgagcaatagggctgtttacagaaatcaggttttgtttaaagtcagcttcgtcatcgccaacgatgcgataagtctgttcttcgtcagaatccagattcagcaccgttacggtagcaccaaaaataacgcgcccattgttgggcattttggtgacatcaatcacctgcgcgttgctcagcttggcttcgatgtctttaatacggccttcgcagaaaccctgctgttcacgagctgcgtggtattcggcgttttctttcaggtcgccatgctcacgcgcttccgcgatagcagcaatgatttcaggacggcgcacagatttcagaaaatccagctcttcgcgtaatttttcagcgccgcgtaaggtcatcggaatagcttgcatttgttatacctcttgaatattcctgatagggcaagtcttcacccaccccggctgttcggcctgcccggcataactccttaccgggaccagaagcaaaaaaataccgacccgggtacaagtcccaggtcagctacaattcacattttgatagtcattttaccctgaagttcccgaagggtcatcgtttactttatagggcgttgcgccgtagtatgacggctcgattccaggttgttagcgcgagattatgcgattttccagatttatcatcggattgaccagctgtatagcgttcagtgttcaggccgcaaatgttgatgagtacattactcaactccccgctggtgccaaccttgccctgatggtgcaaaaagtcggcgcgagcgcccccgctattgattaccacagtcagcagatggcgctgcctgccagtacccagaaagtgattactgcgctggcggcgttgattcaactcggccccgattttcgttttaccacgacgcttgaaaccaaaggcaatgtggaaaacggcgtacttaagggtgacttagtggcgcgatttggtgccgatccgacgttaaaacgtcaggatattcgcaatatggtcgcgactttgaaaaaatctggcgtcaaccaaatcgatggcaatgtgttgatagatacctccattttcgccagccacgataaagcccccggctggccatggaatgacatgacacaatgctttagcgctccgcctgccgccgccatagttgaccgcaactgtttctccgtcagcctctacagtgccccaaagcctggtgatatggcttttatacgcgtggcatcttattaccccgttacgatgttcagccaggtacgcaccctcccccgtggttctgccgaagcgcaatactgcgaactggatgtggtgccaggcgacctgaaccgctttacgctgacgggatgcctgccacaacgttctgagccgctcccgttggcttttgccgtgcaggatggagccagctatgccggtgcaattctgaaagatgagttaaaacaggcgggtatcacctggagcggaacactgctgcgccagactcaggttaacgaacctggaacggtagttgccagtaaacagagcgccccgctgcacgatctgcttaagattatgctgaaaaagagcgacaacatgatcgccgatacggttttccgcatgataggccatgcgcgcttcaatgtgcctggaacatggcgggccgggagcgacgccgtgcgtcagatcctgcgccagcaagccggtgtcgatattggaaacaccattattgccgatggtagtgggcttagccggcataacctgattgcccccgccaccatgatgcaggtgctgcaatacattgcccaacacgacaatgaacttaactttatctccatgctgccgctggcgggctatgacggctctttgcagtaccgtgcaggtctgcatcaggcgggcgtggatggaaaagtcagtgcgaaaaccggtagcttgcagggggtatataacctggcgggattcattaccacagcgagcgggcaacgaatggcgtttgtgcaatatctttctggctatgcagtagaacctgcggatcagcgtaatcgccgtattccgttagtgcgttttgaaagccgtttgtataaagatatttatcagaacaattaatcaaaaagaaaccccggcacatggccggggcttcagattattgacaaagtgcgctttgtttatgccggatgcggcgtaaacgccttatccggcctacaaaatcgtgcaaattcaacatattgcaattctcttgtaggcctgataagcgtagcgcatcaggctgatttggcgtttatcatcagtgattaacgcttgtaaatgaactcaacgccttcttcgtcgtcttcgtcccagtcgtcatcccagtcttcatcatcctcttcagcaatctcttcaagctgctggcgatgataatcatcccacatgaattcgactttctctggctgtttcgcttcttcagcctgcacgaccgggttttcaatgataaaggtcatcacatcccagcagagatctttcacgcccagtccactcgccgcagagatcagataatatttatcttcccagcccagcgcctcagcgatcgctttcgctttctcttcggcttctaccttatccagcagatcgatcttgttgaacactaaccaacgcggtttcgtcgccagatcctggctgtatttttccagctcgctgataataatacgcgcgttttcaaccggatcggtgccgtcaatcggatcgatatcgatgaggtgcaacaggacgcggcaacgttccaggtgcttcaggaagcgaatgcccagacctgcgccttccgcagcgccttcaatcagtcctggaatatcggcaacaacgaagctcttttcgttgtccattcgtaccacacccagacttggcaccagagtggtaaacggataatccgccactttcggtttagccgcgcttaccgcacgaataaaggtgcttttacccgcgtttggcatccccaacataccgacgtcagccagcagcatcagctccagcagcagctcgcgcttatcgcccggcgtgccgttggttttctgccgcggtgtacggttaacggagcttttgaaacgggtattgcccagaccgtgccagccgcccttagcaaccagcagacgctgaccgtgtttggtcatatcgcccatggtttcaccagtaccctggtcgattacacgcgtacctaccggcactttaatcgtcacgtctttaccgcgcttaccggtacagtcgcggcttgcgccattctgaccgcgctctgcacggaaagatttttcaaaacgataatcgataagcgtgttcaggttctcgtcggcttccatccatacgtcaccaccatcaccgccgtcgccgccatccgggccgcctttcggaatatacttttcgcggcggaagctcacgcaaccattaccgccatcacctgcaacgaccagaatgcttgcttcatcaacaaacttcattttattctccgtaaatcattcgcctgcgcggggttggcttaccaccgttgtatgcttacgtaatccgccccaaatacgatgaccaatggcggaatacatcgcgcccgcaaccacgacaaacgcaccgagataacctaaaaggtttaacatcggtctggcgaagaaatcgggccaggccagacttaaaagatcactaaaaaacagcgtaaacagtggggtgagcgtgatgatcgcgctcacctgcgctgcctgccagcgagccatcgcttccgccagggcgccatatcctaccaaggtattcagtccgcaaaaaattaaacatgcgagctgccagtggctaagctgcgctatcactccaggctttgccagagggaagagcgcaattgtacataaagtgtacagtaaaaacaggatctgcggactggccagccgacgcaataaaaccttttgcgccacgccataactcacccaaaccgtcgccgcaccgaccccaaagataactccccaggtgtaatcggtgagctttgtaaatatctcgaccagactggtgttaaaaaacatcaccaggccgctcaggagcatcaatgcccctacaacctgagtgctgcgcattttctctttgaggataaatacgctggcaaccatcatgccaactgggctgagttgcccaatcacctggctagcggtcggactcaggtattgcaaggaactgctgaacaggatgaagttcccaaacagcccggcggtcgccactgccaacaaaatcaaccagcgtggcttacgaaacacgcgtaatggcggcaacctcttcttcaccgcaagaatggcacccaggccaatactcgccatcaagaaacggtaaaacacgattgtcggaggttccatcacctccagcacctgcttcattgcgattggcaacgccccccagcaaattgctgtggtgagcgccaaaagaatgccaatgcctgcctgctgcttcataccgtattccctgcaaagcgcatttgcggattaacgtcgcaccatgcgcatttttaccggttatcgaatgtaaaaagccccgcaacgtgttgcggggctttcatccgttaccgggacgcgaaaaacttattcagcttcgatgctgataaatttacggtttttcgggcctttaacttcgaatttcactttaccgtctgctttagcaaacagagtgtggtcacgaccgcaacctacgttagcgccagcgtggaatttggtaccacgttgacgaacgatgatgctacccgccagaacggattcgccaccgaaacgcttaacgcccaggcgtttagcttcactatcgcgaccgttacgtgtggagccgccagcctttttatgtgccatttgaaatctctcctcaggtcttaggcgctgatgccagtaattttcacatcagtgaaccactgacgatggccctgctgcttacgatagtgtttacgacgacgaaacttaacgattttaactttctcgccacgaccgtgagcaacaacttcagctttgattacgccgccatcaacgaaaggaacgccgattttgacttcttcaccgtttgcgatcatcagcacttcagcgaactcaacagtttcgccagttgcgatgtccagcttttccaggcgaacggtctgaccttcgcttactcggtgttgtttaccaccactttggaaaaccgcgtacatataaaactccgcttccgcgcacaccttttcaatgattcagagtgcgctataaatattcacaatagggcgcgaatattacgcaaaacgcacgcctttgacaagtgctacagtcaatacacgaagaaaaaaaacacaacttgtacggtaacgtttatctgtgccattttttcagtacaatcaccctatattcctaaccataaaccctaagttgcctttgttcacagtaaggtaatcggggcgaaaagcccggcttttgcgatgaatttagaaaaaatcaatgagttaaccgcgcaagatatggcgggtgttaatgcggcaatccttgagcagcttaattccgacgtccaactgatcaatcagttaggctattacatcgtcagcggcggcggtaaacgtattcgtccgatgattgctgtactggctgcacgagctgttggctatgagggaaatgcgcatgtcaccattgctgccctgatcgagtttatccacacggcgactctgctacacgacgacgttgtggatgaaagtgatatgcgcaggggtaaagctaccgccaacgccgcatttggcaatgccgccagcgtgctggtaggcgattttatttatacccgcgctttccagatgatgaccagcctcggtagcctcaaagtgctggaagtcatgagtgaagccgtaaacgtcatcgcagaaggtgaagttctgcaactgatgaacgttaacgatccggacatcactgaagaaaactacatgcgcgttatctatagcaaaaccgcgcgtctgtttgaggctgccgcgcagtgttccgggattctggctggctgtacgccggaggaggagaaaggcctgcaggattatgggcgctatctcggcactgctttccagttgatcgacgatttactcgattacaatgccgatggcgaacagttaggtaaaaatgtcggcgacgatctgaacgaaggtaaaccgacgctgccgctgctgcatgcgatgcatcatggcacaccagaacaggcacagatgatccgtaccgccatcgaacagggtaacggtcgccatcttctggaaccggttctggaagcaatgaacgcttgtggatctcttgaatggacgcgtcagcgtgccgaggaagaagcagacaaagccatcgcagcgttacaggtgctcccggacaccccttggcgagaagcactcatcggcctcgcgcacatcgctgttcaacgcgatcgttaatcccctcccctcatcccgcgcagcgcgcgggatggttccagtaagttccataaaaacacttattcagctctataacacctgaaaaatagggatgtgcatctttatatattctgaatattcacactctttacaggaactttttagagcaataggccatcaggagtatagtgatgctcgacagaagaagtgttctgaatgaaagcgactaacttaaggagtgaggaaaaatggaaagtaatttcattgactggcatcccgctgacatcattgcgggtttgcgcaagaagggaacgagtatggcggcggaatctcgcagaaatggtttgagttccagtacgctggcgaatgcattaagccgcccatggccgaaaggagagatgattattgcgaaagccctgggaactgacccctgggttatctggccaagtcgctaccatgatccgcagacccatgagtttatcgacagaacgcagttgatgcgtagctacactaaaccgaaaaaatgagtggtctggcggtagccccgcgaacggggctgccagctctcagacgattattcgcctttcacacgctcaatatttgcacctaaagcgcgcagtttgtcttcaatgcgttcgtagccacgatcgatgtgataaatacgatcaaccaccgtcgtcccttccgcaatacagccagccagcaccaggcttgcacttgcacgcagatcggttgccataacctgtgcgccagaaagtttttcaacaccgtgacaaataacggtattgctttcgatttcggcgtgcgcgcccatacggctcagctctggcacatgcataaagcggttttcaaagaccgtttcggtgataaacccggtcccttctgccaccaggttcaacagcgtgaactgggcctgcatatcggtcgggaatgccggatgcggcgcggtacgtacgttaacagccttcggacgtttgccatgcatatccaggctaatccagtcttcgccgacttcgatgtccgctccagcgtcacgcagtttcgccagcacggcgtcgagagtatctggctgcgcgttacggcagataattttgccgcgagaaatcgccgccgccaccaggaaagtaccggtttcgatacgatccggcagaacgcgatagacaccgccgcctaaacgttccacaccttcgatgacgatacgatcggtgccctgaccgctaattttcgcacccagcgtaatcaggaagttcgcggtatcgacgatttccggttcacgcgctgcgttttcaataatcgtggtgccttccgccagggttgcagcacacatgatggtcaccgttgcgccaacgctgactttatccatcacgatatgtgcacctttcaaacgaccatcgacggaagctttaacgtaaccttcttccagtttgatggtcgcgcctaattgttcgaggccagaaatgtgtagatcaaccggacgcgcaccgatcgtacaaccgccaggtagactaacttgcccctgaccaaagcgcgctaccagcggccccagcgcccagatagaagcacgcatggttttaaccagatcgtaaggtgcgcagaatacattaacgtcgcgggcatcaatatgcacagaaccattacgttctactttcgcacccagctggcttagcagcttcatacttgtatcgacgtctttcagtttcgggacgttctggatctctaccggttcttccgccagtagtgcggcaaaaaggataggcagagcagcatttttagcgccggaaattgtgacttcgccctggagcttcgttggcccctgaacacgaaatttatccatttagtttgttctcagttaacaattcatatccgctaccggcgaatcgcccatagctcaaaagccgttcagtttgcgatcgcgcgcccactccgcaggggtatacgctttgatgctcacagcatgaatgcggttatccgcaatatattccatcagcggaccatagaccgtctgctgttttttaacccgactcatgccgtcaaacaactcacccacggcaataacctgaaagtggctgccatcgccggaaacgtggacttcctggagggagagagcgttcatcaacacgctctgaatttcattattttccatgggatcttcaatcatcagttaataaaccagcgaaacatcttagagcaaagttgcgctggcataaataagcaaaaagcctcgctgataaatcagacaaggctcgacttgcaggcaggtttgccggacaggcggttaacgccatatccggcctgaaaaaatttaacgaggcagaacatcagcaggcaaattatacaatttcgccagggtatacactttgtcgtttaccccctgaagcgtcacattgttgccctgctttttcgccagatcgataagatggagcagcagtgccagtccccccgtatccacgcgggagacacggctaagatcgatgcaggtaatccccttcaccgcttcctcacgcatttcccaaagcggtagcaaaacgtcctgatccagctctccggataacgccagcgtgtcacccgtctgcatccagctcagactctcgctcattattttttctcttccagagtgattttctgttgagaaatgcttttcagttgcgcagtcaggccgtcgatacctttggtacgcagcagcgttccccactcgttttgtttggtggtgatcatactgacgccttcagcaatcatgtcgtaagcctgccaattgcccgtctgggagtttttacgccactggaagtccagacgcaccggcggacggccattcgggtcaataatggtaacgcgaataggcacaatggttttatcgcccagcggctgttctggcgcaatctgataggtttgaccgtgatacatcgccagcgcctgaccgtaagcctgcttcaggtactcacggaaagcggcaaagtaggcttcacgttgagcaggggtcgcactcttgtaatactggcccagcaccagcgcaccggcgtatttcacctgtacgtatggcagcagttcctgatcaacaatggtacgcagataatccgggttggcccgaatttgcggttgctcattcttcaggcgatcgaacgttttctgcgccgcctcgtccatcagcttatacggattggtctggtctgccgcggttgccgcactcagaggtgcaatcaccagcaaagcgaccatcattaaacgtttaaacatgcgtcggttctcctgaaattatttcgttgtacccacaggttcagtggtttcattattacctggcgcagcagctggcgcatcgccactattcttattgtcatcgcctttactaccgtaaaggaactgaccaatgagatcttccagcaccatcgcagacttagtgtcctgaattgtatcgccatccttcaggatagcagtccccagttccgggtcttcaaaaccgacgtttaatgccagatattgttcccccagcaggccggaagtacgaatgctcaggctactggtatctggaatgtggttataacgttgttcaatttccagcgttacgcgcggcagataggttttcgggtccagcgtaatatccgccacccgacccacaacaacgccaccaatactgaccggagagcgcgctttcaggccgccaatgttatcgaacgtcgcataaagcgtgtaggtcggttcagtacgtatggacgtcacgttcgccgccttcaggcaaacaaacagcgccgccagcagtgctgctaataaaaagatacccacccaaatttcattttttttcgtttgcatgaactcaattcccaaacatcaatgcggtcagcacaaaatccagccccagaacagccagagagctgtggacaacggtgcgagtggttgcccggctaatcccggcagacgtcgggatggcgtcgtagccgttaaacaagctaatccacgtcaccgtgatggcgaacaccacgctcttaatcagacagttgaccagatccatacgccagtcgacggcattttgcattgcgctccagaagaacccgctatcaatgcctttccaactgacgccgaccagagatccgccccagatccccacggcgacgaaaataaccgtcaacagtggtaaactaataaccccagcccagaaacggggagaaataacccgacgcagcggatccaccgccatcatctccatactggagagttgctctgtagcgcgcatcaggccgatttctgcggttagcgcgctaccagcacgcccggcaaacaacaacgcggcaaccaccggccccagttcacgcagtaggcttaacgccaccagcatacccagactggtttccgcactataagtggtcagaaccagataaccttgcagccccaacaccattccgatgaacacgccagaaaccacaataatcagcatgctcaggacgccgacattatagagctggcgcaccagcagcggcgcatgtttgcgaaattccggtttgccgaccagcgcattgaataacattaacccggcccgcccgaacgttctcagggttttaatccctttatgtccgaggctcgccagcgcatttaacagcatgagtggcttaactccctggtaaaagatcagcgtgataatcgccggcaggatagcggaacggaacaggcccgtcagctatcccgtccagaaactgacgtacgcgcggatcaggattcgcctgcaacgcctgggcactgccatgagcgacaatttttttgtccgccaggatccaggcgtgatccgcaatacttaacacttccggcacatcgtgagaaaccaccacacaagtcacgcccagcgcgctgttcagctcagaaatcagcttcaccagtacgcccatggtgatgggatcttgcccaacaaaaggttcatcaaacatgatgagatccggctccagcgcaatcgcacgcgccagcgctgcacgccgcgccatcccaccggaaagttcagaaggcattagtttagccgctccacgcagccccacggcctccagcttcatcatcaccgtactatgcaacaatggcgcgggaagttgggtatgttcgcgcagtggataggcgacgttgtcaaatacgttcatatcagtgaacaacgccccggactgaaataacatgctcatccgtttgcgcactgtatacaggcggctacgagacatcgccggaatattctcaccatcgaaaaggatctcaccatgatctggtgcgatttgcccgccaatcagacggagtagcgtcgttttaccgatgccgcttggccccatgatcgccgtgatcttccctcgcggcacggtcagggaaatattatcgaagatgcagcgattgccacgcgtaaaactgacatcgcgcatatcgactaaattcgccacagactgctccataattcacccttcgtcttgcgttgattttctaagcatggcgctcaatttaaccttgaacccaacatatttacagaatattacccgccgtggttagcgaaagctggcatttgttttactttttagccgcataaagtcaaaattaagcatccgttacggctttctgaaaatcttcagcggaccggcgagtatacctgaagaaaggacgttagatgcttttagctacggcactgttaattgttggtttacttttggtcgtttacagtgccgaccgcctggtttttgccgcgtctattctttgccgaacctttggcatcccgccgctgatcatcggcatgacggtggtcagtattggtacaagcttaccagaagtcatcgtcagccttgccgcgtctctgcacgaacaacgcgatttagccgttggtacagccctcggcagtaacattatcaatatattgctgatcctcggtctggctgcgctggttcgtccttttaccgtccattctgatgttctacgccgtgaattacccttaatgttgttggtcagcgtggtggccggttccgtactctatgacggacaacttagtcgcagcgatggtatctttctcctctttctggctgtgctatggctgctgttcattgttaaacttgcacgtcaggctgaacgtcaggggactgacagcctgaccagagagcagcttgcagagctgccgcgtgacggcggattgcccgtcgcgtttttatggctcggcattgcgcttatcatcatgccagtggccacgcggatggtggttgataacgccacggtgctggcgaattactttgccatcagcgagttgacgatgggtctgacggcaattgctatcggaaccagcctgccggaactggcaaccgcaatagcgggggttcgcaaaggtgaaaacgacattgctgtcggaaatatcattggcgcaaacatttttaatattgtcatcgtgttgggtttacccgcgctgataacgccaggagagattgatccactggcgtacagtcgtgactacagcgtgatgttgctggtgagcattatttttgcgttgctgtgctggcggcgctccccgcaaccgggccgtggtgtaggggtattattaactggcggatttatcgtatggctggcgatgttgtactggttaagcccaatactcgttgaataactggaaacgcattatgagccacgtagagttacaaccgggttttgactttcagcaagcaggtaaagaagtcctggcgattgaacgtgaatgcctggcggagcttgatcaatacatcaatcagaatttcacgcttgcctgtgaaaagatgttctggtgtaaagggaaagttgtcgtcatggggatgggaaaaagcgggcatattgggcgaaaaatggcggcaacgtttgccagcaccggtacacctagttttttcgtccatcctggtgaagccgcgcatggtgatttaggcatggttaccccacaggatgtggtgattgctatctctaactctggtgaatccagcgaaatcacggccttaattccagtgcttaagcgtcttcacgtaccgttaatctgcatcaccggtcgcccggagagcagcatggcgcgcgccgcagatgtgcatctgtgtgttaaagtagcgaaagaagcctgtccgttagggctggcaccgaccagcagcaccaccgccacgctggttatgggcgatgccctcgctgtcgcgctgttaaaagcacgcggctttactgctgaagattttgcgctcagtcacccaggcggcgcactgggtcgtaaacttctgctgcgcgtaaacgatattatgcatacgggcgatgagatcccgcatgttaagaaaacggccagtctgcgtgacgcgttgctggaagttacccgcaaaaatcttggtatgactgtcatttgcgatgacaatatgatgattgaaggcatctttaccgacggtgatttacgccgtgtcttcgatatgggcgtggatgttcgtcagttaagtattgccgatgtgatgacgccggggggaatacgtgtgcgccctggcattctggccgttgaggcactgaacttaatgcagtcccgccatatcacctccgtgatggttgccgatggcgaccatttactcggtgtgttacatatgcatgatttactgcgtgcaggcgtagtgtaaagattcaaggataaacaacaatgagcaaagcaggtgcgagccttgcgacctgttacggccctgtcagcgccgacgttatagcaaaagcagagaacattcgtctgctgatcctcgatgtcgatggcgtactgagtgatggcctgatttatatgggcaataatggcgaagagctgaaagcgttcaatgttcgtgacggttatggcattcgttgtgcgctcacctctgatattgaagtcgctatcattaccgggcgaaaggctaaactggtagaagatcgttgtgccacattggggatcactcacttgtatcaggggcagagtaacaaactgatcgcctttagcgatctgctggaaaaactggcgattgccccggaaaatgtggcttatgtcggcgatgatctcatcgactggccggtaatggaaaaagtgggtttaagcgtcgccgtggccgatgcgcatccactgttgatcccgcgcgccgattacgtgacgcgcattgctggcggtcgtggcgcagtgcgcgaagtttgcgacttattactcctggcgcagggcaaactggatgaagccaaagggcaaagcatatgagtaaagccagacgttgggttatcattgtgctaagtctggcggttctggtgatgatcggcattaatatggccgaaaaagacgataccgcccaggtggtcgtcaacaacaatgatcccacctataaaagcgagcatacggacacgctcgtctataacccagaaggggcactaagctatcgattgattgctcaacacgttgaatattattccgatcaggccgttagctggtttacgcagccggtacttaccacgtttgataaggataaaatcccgacatggtccgtaaaagcagataaagccaagctgaccaatgaccggatgctctatttatatggacacgttgaagtcaacgcacttgtgccagactctcaacttcgcagaatcacgacggataacgcgcagatcaatctggtgacgcaggatgttacctctgaagacctcgtcacgttatacggaacaacatttaactccagcggtctgaaaatgcgcggcaacttacgcagcaagaacgccgagctgattgaaaaggttagaacatcctatgaaattcaaaacaaacaaactcagccttaatcttgtgcttgccagcagtcttctggccgccagcattccggcatttgccgtaaccggagacactgatcagccgatccacattgaaagcgaccagcaatctcttgatatgcaaggcaacgtggttacctttaccggtaatgtcatcgtcacccagggcaccatcaaaattaatgccgacaaagtggtcgttacccgtccgggcggcgaacaaggtaaagaagtgattgacggctacggtaaaccggcaacgttctaccagatgcaggacaacggtaaacccgttgaaggtcacgcttcccagatgcactacgaactggcaaaagattttgtcgttctgacgggtaatgcttatctgcagcaggtcgatagcaacattaagggcgataagatcacttacctggtgaaagagcagaaaatgcaggctttcagcgacaaaggcaagcgcgtaacaaccgttctggtgccgagccagctgcaggacaaaaacaacaaaggccagaccccggcacagaagaagggtaattaattcgttatggcaacattaactgcaaagaaccttgcaaaagcctataaaggccgtcgcgtggtagaagacgtcagcctgaccgtcaactccggggaaattgtcggtctgctggggccaaacggtgccggtaagaccaccactttctacatggttgtaggcattgtgccgcgcgatgcgggcaacatcattattgatgatgacgatatcagtctgctgcctctgcatgcacgcgcgcgccgcggtatcggctatctgccacaggaagcctccattttccgtcgcctcagcgtttacgataacctgatggcggtactgcaaattcgtgacgacttgtctgctgaacaacgtgaagaccgcgcgaacgagctgatggaagagtttcacattgagcacctgcgtgacagcatggggcagagtctctccgggggtgaacgtcgccgtgtagaaattgcccgcgcactggctgcgaatccgaaatttattctgctcgacgaaccgtttgccggggttgacccgatcagcgttatcgacattaaacgcatcattgagcacctgcgcgacagcggcctgggcgtgctgatcactgaccacaacgtgcgtgaaacactggcggtttgtgaacgcgcttatatcgtcagtcaggggcatttgatcgcccacggcacgcctacagaaatcttacaagacgaacacgttaagcgtgtataccttggggaagacttcagactctgatagggtagaagtttgcgacgttttagcaggagagtacgattctgaacatgaagcaaggtttgcaactcaggcttagccaacaactggcgatgacgccacagctccaacaggcaattcgtctgttgcagttgagcacgctggaacttcagcaggagctacagcaggcgctggagagtaatccgctgcttgagcaaatcgacactcatgaagaaatcgacacccgcgaaacgcaagacagtgaaacgctggacaccgccgacgcgctcgaacaaaaagagatgccggaagagctgccgctcgatgccagttgggacaccatttacaccgctggtacaccatccggcaccagcggtgactacattgacgacgagctgccggtctaccagggcgaaacgacgcagaccttgcaggattacctgatgtggcaggttgagctgacaccgttttccgacactgaccgcgctattgctacctctatcgtcgatgccgttgatgaaaccggttatctgactgtcccgctggaagatattctcgaaagtataggcgatgaagagatcgacatcgacgaagttgaagccgtccttaagcggatccaacggtttgatccggtcggtgtggcggcaaaagatctgcgtgactgtctgctgatccaactctcccaattcgataagaccacgccgtggctggaagaggccagactgatcattagcgatcatctcgatctgttagccaatcacgacttccgcactttaatgcgcgtcacgcgtctgaaagaagatgtgctgaaagaagccgtcaatctgatccagagcctcgatccgcgccccgggcagagcatccagactggcgaacctgagtatgtcattccagatgtgctggtgcgtaagcataacggtcactggacggtagaactcaacagtgacagcattccgcgtctgcaaatcaaccagcactacgccagcatgtgcaataacgcgcgcaacgatggtgacagccagtttatccgcagcaatctgcaggatgccaaatggttgatcaagagtctggaaagccgtaacgatacgctactgcgcgtgagtcgctgtatcgttgaacagcagcaagccttctttgagcaaggtgaagaatatatgaaaccgatggtactggccgatatcgcccaggctgtcgaaatgcatgaaagcacgatatctcgcgtgaccacgcaaaaatacctgcatagtccacgaggcatttttgaactgaagtatttcttttccagtcacgtcaataccgagggcggcggcgaagcttcctccacggcgattcgtgcgctggtgaagaaattaatcgcggcggaaaacccagcgaaaccgttgagcgacagcaagttaacctctttgctgagcgaacaaggtatcatggtggcacgccgcactgttgcgaagtaccgagagtctttatccattccgccgagtaaccagcgtaaacaactcgtttgacccaaccgataaggaagacactatgcagctcaacattaccggaaataacgtcgagatcaccgaggcactgcgcgaatttgttacagccaaatttgccaaacttgagcaatattttgaccgaatcaaccaggtctatgttgttctgaaagtggagaaagtcacccacaccagtgatgcaacactgcatgtaaacggtggtgaaattcatgccagcgcggaaggtcaggacatgtacgctgccattgatggcttaattgataagctggcacgccagttgaccaaacataaagataaactgaaacaacactaattgtccgggcaattagcatgtgcatggcggtctgttgtgcggcacaacgggccatttgtacggttaatgctccgagcctgttccactgtttgagtgggcaggttcttaggtgaaattatgacaaataatgatacaactctacagcttagcagtgttcttaacagggaatgtacgcgaagccgcgtccactgtcagagcaaaaaacgcgccctggaaatcatcagcgagctggcggcgaaacaacttagcctgccgcctcaggtggtttttgaagctatcctgacgcgggaaaaaatgggcagtaccggtatcggcaatggtattgccattccgcatggcaaactggaagaagatactctgcgcgccgttggcgttttcgttcagctcgaaacgcctatagctttcgatgccatcgacaaccaaccggtggacttactttttgccctgctggtgccggcagaccaaactaaaacgcacctgcatactctgagcctggtggcgaaacgtctggcggacaaaaccatctgccgccgtttacgcgcagcccagagcgatgaagagctgtatcaaatcattacggataccgaaggtactccggatgaagcgtaattattcggtaatgtctcttttagacgttgtgaggagaaacagtacatggtactgatgatcgtcagcggacgtagtggtagtggtaaatctgtcgccctgcgtgcgctggaagatatgggtttttactgcgtggataaccttcccgtagtgttgttacccgatctggctcgaaccctggccgatcgcgagatttctgccgccgtcagcattgatgttcgtaatatgccggagagtccagaaatattcgaacaggcgatgagtaacctgcctgacgctttcagtccgcaactcctgttcctggatgccgaccgtaataccttaattcgtcgttacagtgacacgcgccgactgcatccgctttccagcaaaaacctgagcctggaaagtgctatcgacaaagaaagcgatttgctggagcctctgcgtagccgagcggatctgattgtcgataccagtgaaatgtccgttcacgagctggctgaaatgctgcgtacccgtctgctgggtaaacgtgaacgcgaactgaccatggtctttgagtctttcggcttcaaacacggtatccctatcgatgcagattacgtctttgacgtgcgcttcttgccgaacccgcactgggatccgaaactgcgtccaatgacaggtcttgataaacctgtcgccgcgttcctcgaccgccacacagaagtacacaattttatctaccagacgcgaagctatcttgagctatggttacctatgctggaaaccaacaaccgtagctacttgacggtcgccattggttgtaccggcgggaagcaccgtagcgtgtatattgcagagcaactggcagactacttccgcagccgcggtaaaaacgtccagagtcgccatcgtacgctggaaaaacgtaaaccatgaccgtcaagcaaactgttgaaatcacaaacaagctgggcatgcatgcccggcctgcaatgaagctgtttgaattaatgcagggttttgacgctgaagtgctcttacgtaatgacgaaggcaccgaggctgaagccaacagcgttattgcgctgctgatgttggattctgccaaaggacggcagattgaagttgaagcgaccggtccacaggaagaggaagcactggccgccgttatcgccctctttaattctggttttgatgaagattaatcttcatcactttgacatacaactcccttcaaactccccccgacaataagaaaatcacgtactgaaatcgttctcaatcaacgtcatttgtacattttgtgcgcttttcactttcagaagaaccttaagaaaaccttaagaggcattgtttaggttttgtttaagttaatcgaccatactggagatcgtcagaaaatatttccaggagatggcatgattcgcttatctgaacaaagtcccctgggcaccggaagacatcggaaatgttatgcgcatccggaagatgcccaacgctgtatcaagattgtctaccatcgtggcgatggtggcgataaagagatccgccgtgagttaaagtactacgcgcatcttggtcgccggttaaaagactggagtggaataccgcgctatcacggtaccgttgagacggattgcggaaccggttatgtctacgatgtgattgcagattttgacggcaagccttccattacgctgaccgaatttgctgaacaatgccgttacgaagaagacattgcacaactgcgccagctactgaaacagctgaagcgttatttgcaggataaccgtatcgtgacgatgagcctgaagccgcagaatatcctctgtcaccgcatcagtgagagtgaggttatcccggtcgtctgcgacaacattggtgaaagcacattgattccactggcgacctggagcaagtggtgttgtctgcgtaagcaagagcggttatggaaacgatttatcgcccaaccggcgctggctattgccctgcagaaagatctgcaacctcgtgagagcaaaacgctggccctcactagccgcgaagcttaatccagctggtgttgttgcataaacggctcaccgcctaactgatacatctgccgtaaaatccacgcctgacggctacgcacgtagccgcttgggctggagactttgaaacgaagtggattaggtaatacagctgccagtaatgcagcttcgctccgggtaagtttgctcgcgggtttgtggaaataacgttgtgccgcagcttcgacgccaaacacaccgtcgccaaattcggcgatattcaggtaaaccgtcaggatacgctttttgctccagaccgtttctatccccagcgttaatccggcttccagcccttttcgaacccagctacgcccatcccataaaaagagatttttggctgtctgttgagaaatcgtactagcaccgcgaatacggttttcattgcgctcgttgtgcgccagggctttctcaatggaagcgacatcaaagccccagtgctcaggaaatttctgatcttctgcggcaatcaccgccagtcccatccacgggctgatttgatccatactgacccagtcagaatgtgccacgtaacgaaaattgccatgcagccaggcgctgacctgtcgctcgaccattaccgcactgaagggaacaggcgcaacgctaaacaacgcgatgcccccgccccagaaaacggcgaggacaaccattaaccgcaaaagaaaacggcgaacgaaactaaacaccgttaagcggcttttactcattcagccagaaccagcacgcgggaaaccagcttatcaatgccgctcgccgcttctgcaatgttctgcgccagcatatatgctggggtggtgacaatcttattgtcttcatcaaccacgatatcatcgacaggacacggcacatgctccgcgcccatctcttccagcacttctgcggtatcgatatcagtaccgatggtcaaacgcagcgggaaatcgaaaattttcggcagcatcgccggggcaatacacataaaaccaagcggttttccggcctgatgcatcgcttgtgccagcgcctttaattcacggtcaacggtgcattcgctaccaagactggcaaaattgcttaaattcttcgccgcgccaaacccccccggcacaatcaacgcatccagttcagcggcatcggcctgggccagaggacggatttcaccgcgcgttattcgtgccgcttcaatcagcacattgcgcgtttccgtcatcgcttcgccagttaaatggttgataacatcaacctgctgcttatccggtgcaaagcagaccgcctgcgcaccgctgcgactaatagctaacaacgtcaacaccgcttcatgaatttcagaaccgtcatagacgccgcatccgctcagaattacgccaattttcttcattgtgatcatcctttcgcaattgactgaaacacattaatttttttaataaaaatggtacgcatcacacatttaactgattcatgtaacaaatcatttaagttttgctatcttaactgcgtgcggcctgaaaaacagtgctgtgcccttgtaactcatcataataatttacggcgcagccaagatttccctggtgttggcgcagtattcgcgcaccccggtctagccggggtcattttttagtggcttttgccacccacgctttcagcacttctacgtcgtgacgccactcttctttcatctcttcaatccattcaccgacgttatcttcccaggccggaaggtcaggagactgaatttgctgacccagctgttgcagatggcgtaaccccacactccccgccgcacctttaattttatgtccttcctcaacaatgccttttttatcctgcgccgtcagattgctctccagcacgctgacatagcccggcatcatcttctcaaacaccgctaacccgtcggtgatcagcttcggtcctacaagttcgagatactgttccagcatgggaatatcgagcaatgcttcacttttactgttctcttctgtcgtcaccgtactctcctcatcatcctgggtatcccagaatttcttgatcatcgcggttagcgccggaacagaaagcggcttactcagcacatcatccattccagcattgaggtactcttgtttgtctttcagcacgttagcggttaaggccaccagcggcggtaaatcctcgcgcggataacgtttcgtcagttcacgagagatatccagcccggtcatatctggcaactgaatatccagcaacaccaggtcgtattcgcccggtttaaacatctccagcgccgccttgccggtcatggcgacatcaacgctgttacctaatttttccagcacagaacgcgcaacaatcacgttcagttcaatgtcttccaccagcagcacattcagcgccggtaaaggcatatcgtcttcatcaaacgcatcatcgacctcttctgctacgctcggtgcgtggatcgtcaacgtaaaggtactacctttgccctgttcgctggtaaccgtaatatcgccgcccatatttttcgccagacgacgagaaacggccagaccaataccggtgccggtggcaggtttaccgccatgactgtctttcacctggtaatacatggcgaaaattttatccagctcatcctgcggaatgccgataccagagtcttccacttcaaaatgcagcatatcgccttcatcgtagcgcacgcgcacggtaacctggccttgctgggtgaatttgacggcgttactgatgaggttccacaggatctgccgtaaacgcgtcccgtcggtaatgacctgatgcggtaatggcagcgtcggctccaggttaaagcgcaatcctttttgttgcgcctgcaatgcggagagattttccagatcggcaaggaagctggtgaaatcaaccggttgattatcaagctggaccttgcgccgttccatcttatccatgtcgataatatcgttaaagatattccccagcgtgacggcgctaacatggatggtcttgagatatttttcctgctcggcggtgagttcggtatccagcagaatgcggctcagaccgacgataccgttcagcggtgtacgcaattcgtgactgatggtggagataaacgtcgttttgtcgcggctggcccgttcaagcgcatcctgataccgcttacgctcggtaatgtcgcgaccaaagcccatcaaaccgtgacgtttacccacgcggtcgtagtacggcactttacggatttcaaagcaggctttgcgcccgtccgggtaatccagccactgttcataggtcagactcacattatgacggaacactttttcatcggtttcaatgacttttgcggcggcttccggactgtaaacatcagcaggtttcaggtgaaccagttgtttttcgctttttccggtcagcagctccatcgcgcggttacagccggaaaactctttatcttcgttacgataaaaaaccaggtcgggactagcatcaaggaaggaacgtaagaaactggattgctgctcgagctgaatttgtgtctcttcgcgctctttgatttcaattttcagttggccgaaggtttcctgcagttctgcttccgctttttcacgaacggcaatttcctgatttagctgggcaatattatcttttaactgaacgttgaggctcaaatcgcgctcgcgcatctcctccagtttttgcaccagccgactcagacgttgtcgactctcctccagttgctcgacgaccacgcttagaaagtagaccgcccacggcgtaatcagcaaaccaaagaagatagaacgaataacatcaatgctttcgacctgaccatgcagcaccatggttaccgccatttgtaccacaatggcaagaacgacgagggccagcgccagcaacatactgaagcgcaccagacctaacttcatcatcaggtcaacataatactgcgccagcagacgaatttgcttcattagggaattccttcacgacaacctgccccaataatacccaattctgacagttacgttataaattgtgtgagaaatgcggaattcccctcaacgacttactccgttggaggtagccacggacgtcccagcgcgcttccctgtacgccatgttcattcagatagcgatccagctcgaccattcccgtccatcgattttcgcaccacagcggagcaagcagcgtcgggcgacgggcgctggcggaaatgcggtggtagatcacttccggtggcgtatggcgaatcatttctccggcagtgagcgtgtaatcctccagttcaataccgttcaaacgccccgcttcccaggctttcgccataatgctgcctttcacaatatgcagcggatgcagctttatgccgtccacgccggtttcaaccactcgctccagcgtttgcaaacattcagcctgcccttcgccaggcaggccgacaattaagtgggaacacaccttcagcccgcgctgacgtgccagctgggttgtacgctgataacaggcaaaatcatggccgcggttgatgcgatgcagtgttttgtcgtgggcggtttgtagccccagctccagccacacttcgtaaccctggtccttatattcgcaaagcagatccagcaccgcatccggcacgcagtccgggcgggtacccacacacaaaccgacaatattggcctggctcaccgcctgctgatacatagaacgcagcacctgaacttccgcaaaggtgctggtatacgcctgaaagtaggccagatagcgtttagcgcggttaactaaattcgcctggtgcgccagttgctcggcaatggaacgatgctgctgcgcttcatcggcaaagctggcaacattacagaatgtgcagccaccacgcccgatggtaccgtcacggttagggcagctaaaaccgccgtgcagcgtcagcttatgcaccttttgcccataacgacgggtgagatcaccaccaaacatattgactaatttctgtaactgcataatctgatagaccgcgccttgaaaagaggccaaagcctgccatttttagctcaattcggcgatgacctggatcaatcgtcccggcctgcttttatcaactgcataatcaatcaaaattaccgaaatttcatgcataatcacataaatcacttttgcttatcttgtgtcagatttttttatctcctgatggattttaggcaaaaacagtagcatgaaacgtcattaccaattaaggcagtataaaatgctggttttgtcgtcagttcaaggcaggataagggttaacacacctttatgacagtcaggaattgactgtttctctaacgacttcccttttagccttaaagataaaatccattttaatttcagtcatttaataaagaattttgcgctaaagcacatttctgtaccaataagcttgccatttgacctgtatcagctttcccgataagttggaaatccgctggaagctttctggatgagcagcctgctcatcatatttatgcagtaattgagatcccctcttcaccgtattaaccgatgcgaaaaggacaacaagggggcgaatgcgaggcgcgcgtatgacacgcaaaccccgtcgccacgctctttctgtgcccgtgcgcagcggtagcgaagtggggttcccgcagagcctgggggaggttcacgatatgttgtacgataaatcccttgagagggataactgtggtttcggcctgatcgcccacatagaaggcgaacctagccacaaggtagtgcgtactgcaatacacgcactggcccgcatgcagcaccgtggcgcgattctcgccgatggtaaaaccggcgacggttgcggcttgctgttacaaaaaccggatcgcttttttcgcatcgttgcgcaggagcgcggctggcgtttagcaaaaaactacgctgtcgggatgctcttcctgaataaagatcctgaactcgccgctgccgcacgccgcatcgttgaagaagaactgcaacgcgaaaccttgagcattgtgggctggcgtgatgtccccactaacgaaggcgtgctgggtgaaatcgccctctcctctctgccacgcattgagcaaatttttgtgaacgccccggcaggctggcgtccacgcgatatggagcgccgtctgtttatcgcccgccgccgcattgaaaagcgtctcgaagccgacaaagacttctacgtctgtagcctgagcaatctggtgaacatctataaaggtctgtgtatgccgacggatctgccgcgcttttatctggatcttgcggacctgcgtctggaaagcgccatttgcctgttccaccagcgcttctccactaacaccgtaccgcgctggccgctggcgcaaccgttccgctatctggcgcataacggtgaaatcaacaccatcaccggtaaccgccaatgggcgcgtgcgcgtacttataaattccagacaccgcttatccctgacctgcacgacgccgcaccgttcgtcaacgaaaccggctctgactccagtagcatggataacatgctggaactgctgctggcaggcgggatggatatcatccgcgccatgcgtctattagtaccacccgcctggcagaacaacccggatatggacccggaactgcgtgccttctttgactttaactccatgcatatggagccgtgggatggcccggcgggcatcgtgatgtccgacggtcgttttgccgcctgtaacctcgaccgtaacggtctgcgtccggcgcgctacgtcatcaccaaagataagctcatcacctgcgcctctgaagtcggtatctgggattaccagcctgacgaagtggtcgaaaaaggccgcgtcgggccaggcgaactgatggttatcgacacccgcagtgggcgtattctgcacagcgcagaaaccgatgacgatctgaaaagccgccatccatataaagagtggatggagaaaaacgtccgccgactggtaccgtttgaagatctgcccgatgaagaagtgggtagccgcgaactggacgacgacacgcttgccagctaccagaaacagtttaactacagcgcggaagagctggactccgtaattcgcgtactgggcgaaaacggtcaggaagcggtcggtagcatgggcgatgataccccattcgccgtgctctccagtcagccgcgcattatttacgactacttccgccagcagtttgcccaggtgactaacccgccaatcgacccgctgcgtgaagcgcatgttatgagcctcgccaccagtatcggtcgtgaaatgaacgtcttttgcgaagcagagggccaggcgcaccgtttaagctttaaaagcccgattctgctctactccgatttcaaacagctcacgacgatgaaagaggagcactaccgcgcagatacgctggatatcacctttgacgtcactaaaaccacgctcgaagcgacagtcaaagagctgtgcgacaaagccgaaaaaatggtacgtagcggcaccgtgctgctggtgctctccgaccggaatatcgctaaagatcgcctgccggttccagccccgatggcggttggcgcgatccagacccgtctggtcgatcaaagcctgcgttgcgatgccaacatcatcgtcgaaaccgccagcgcccgcgatccgcaccacttcgccgtgttgctgggcttcggcgcgacggctatttatccataccttgcctatgaaacgctgggccgcctggtagacacccatgcgattgccaaagattatcgtaccgtgatgctcaactaccgtaacggcatcaacaaaggcttgtacaaaatcatgtccaaaatgggcatctccaccatcgcctcttaccgctgcagcaaactgtttgaagcggtcggtctacacgatgatgtagtgggcctgtgcttccagggggcggtcagccgcattggtggagcaagctttgaagacttccagcaggatctgctgaatctgagcaaacgtgcctggctggcgcgtaagcccatcagccagggcggtctgctgaaatacgtccacggcggcgaataccacgcctacaacccggacgtggtgcgcacgctgcaacaagcggtacaaagcggcgagtacagcgactatcaggaatacgcgaagctggttaatgagcgtccggcaaccacgctgcgcgatctgctggcaattacgccgggtgaaaacgcggtcaacattgctgatgttgaaccggcaagcgaactgtttaaacgctttgataccgccgcgatgtctatcggcgcgttaagcccggaagcccacgaggcgctggcggaagcgatgaacagcatcggcggtaatagcaactccggtgaaggcggcgaagacccggcgcgctacggcaccaacaaagtgagccgcatcaagcaggtggcttccggtcgctttggggttactccggcgtatctggtcaatgccgacgtcattcagattaaagtcgcccagggcgcgaagccaggcgaaggcggtcagttgccgggtgataaagtcacgccttacatcgccaaactgcgctatagcgtgcccggagtgacgctgatctccccgccgccgcaccacgatatctactctatcgaggacttagcgcagctcattttcgacctcaagcaggttaacccgaaagcgatgatctccgtgaagctggtttccgaaccgggagtaggcaccatcgcgactggcgtggcaaaagcttatgcggacttgatcaccatcgcaggctatgacggcggcaccggcgcaagtccgcttagtagcgtgaaatacgcaggctgtccgtgggagctggggcttgttgaaacccagcaggcgctggttgctaacggcttgcgtcacaagatccgtttgcaggtcgatggcggcctgaaaacgggtgtcgatatcatcaaggcggcgattctcggcgcagaaagcttcggcttcggcactggcccgatggtggcgctcggctgtaaatatctacgtatttgccatctgaacaactgcgcaacgggtgtagcaactcaggatgacaaactgcgtaagaaccactatcacggcctgccattcaaggtgacgaattactttgagtttatcgcccgtgaaacccgcgagctgatggcacagcttggcgtaacacgtctggtggatctgattggtcgcaccgacctgctgaaagagctggacggtttcaccgccaaacagcagaagctggcgctgagcaagctgctggagactgccgaaccgcatccaggtaaggcactctactgcaccgaaaacaacccgccgtttgataacggcctgctgaacgcgcagttgctgcaacaggcgaaaccgtttgtcgatgagcgccagagcaaaaccttctggttcgatattcgcaacaccgaccgttctgtcggcgcgagccttagtggctatatcgcccagacgcacggcgatcaggggctggcagccgatcctatcaaagcgtacttcaacggcaccgcaggccagagcttcggcgtgtggaacgcgggcggcgtggaactgtacctgaccggtgatgccaacgactatgtcggtaaaggcatggcgggcggcttaatcgccattcgtcctccggttggttccgccttccgcagccatgaagcaagcattatcggcaacacctgcctgtatggcgcgaccggtggtcgtctgtatgccgcaggccgcgcgggtgaacgtttcggcgtgcgtaactccggtgctatcaccgtggtagaaggcattggcgacaacggttgtgaatatatgacgggtggtatcgtctgcattctgggtaaaaccggcgttaacttcggtgcgggcatgaccggcggtttcgcttacgttctcgatgaaagcggcgatttccgcaaacgcgttaacccggaactggtcgaggtcttaagcgttgacgctctggcgatccatgaagagcatctgcgtggtcttatcaccgagcatgtgcagcataccggctctcagcgcggtgaagagattctggcgaactggagtaccttcgccactaaatttgcgctggttaaaccgaagtccagtgatgtaaaagcactgctgggtcaccgtagtcgtagcgcagctgagttgcgcgtgcaggcgcagtaaggggtagcaacaatgagtcagaatgtttatcaatttatcgacctgcagcgcgttgatccgccaaagaaaccgctgaagatccgcaaaattgagtttgttgaaatttacgagccgttttccgaaggccaggccaaagcgcaggctgaccgctgcctgagctgcggcaacccatactgcgagtggaaatgcccggtacacaactacatcccgaactggctgaagctcgccaacgaggggcgtatttttgaagcggcggaactgagccaccagaccaacaccctgccggaagtttgcggacgagtctgcccgcaagaccgtctgtgcgaaggttcctgcactctgaacgatgagtttggcgcggtgaccatcggcaacattgagcgctatatcaacgataaagcgttcgagatgggctggcgtccggatatgtctggtgtgaaacagaccggtaaaaaagtggcgattatcggcgcaggcccggcaggtctggcgtgtgcggatgtcctgacgcgtaacggcgtaaaagccgttgtcttcgaccgtcatccagaaattggcgggctgctgaccttcggtattccggccttcaagctggaaaaagaggtaatgacgcgtcgccgtgaaatcttcaccggcatgggtattgaattcaaactcaataccgaagtgggccgcgacgtacagctggacgatctgctgagtgattacgatgccgtgttccttggcgtcgggacttatcagagtatgcgcggcgggctggaaaacgaagacgccgatggcgtgtacgcagcgctgccgttcctcatcgccaacaccaaacagttaatgggctttggtgaaacccgcgacgaaccgttcgtcagcatggaaggcaaacgcgtggtggtccttggcggtggcgacactgcgatggactgcgtgcgtacgtccgtgcgccagggagcgaagcacgttacctgtgcctatcgtcgtgatgaagagaacatgccgggttcccgccgcgaagtgaaaaacgcgcgggaagaaggcgtagagttcaaattcaacgtccagccgctgggtattgaagtgaacggtaacggcaaagtcagcggcgtaaaaatggtgcgtaccgaaatgggcgaaccggacgccaaaggccgtcgccgcgcggagatcgttgcaggttccgaacatatcgttccggcagatgcggtgatcatggcgtttggtttccgtccacacaacatggaatggctggcaaaacacagcgtcgagctggatagtcaaggccgcatcatcgccccggaaggcagcgacaacgccttccagaccagcaacccgaaaatctttgctggcggcgatatcgtccgtggttccgatctggtggtgaccgctattgccgaaggtcgtaaggcggcagacggtattatgaactggctggaagtttaagcgaggtaacaatgaattcgccagactgtgtctggcgaatcaaattactgacgaagtgcgcgttgttttctggcaaatgcggcatgagcgtttgacctttcctataatagggataattttcaataaattgtgctttgttcaccaagtctgatgagtgaagcacatcaagcaatttctcatttacaatccgtctcaattacttgttaacacctctgacaataccgattctgcaagctattcagtcttttcattccatgtaaattgtctcgatattaatatacaaaatatgaatataaaaaaccaatatattatccttaattatctatatattttcctatttttcagcgcaaacattcatgtaatgaataattatcaccacaaaccacctcaccagcaccttattattcacatgatcgtaactataaaattcattaaataaatacatcccagcaagttggctatttctgaacgagttatttatttacattcacaaacagatatatatactgcttcagctttttattttaaaaaataaatttgttattaaggatatgttcatatgtttttcaaaaagaacctcacaacagctgctatttgtgcagcactttctgttgcagcattcagtgccatggcaacagatagtactgatacagaattaactatcatcggcgagtatacccctggtgcatgtaccccagttgttacgggcggcggcattgttgactatgggaaacatcataacagtgcgctgaatccgaccggtaaaagtaataaactggttcaactgggccgcaaaaacagcacattaaatataacctgcacagcaccaacgctaattgctgtaacctccaaggataaccgtcagagcaccattgtagcgttaaacgacacatcctatattgaaaaagcttatgatactctcgtagatatgaagggaacgaaaaacgcctttggtttaggttctgcgcctaatggacaaaaaattggcgctgcatccattggtattgacaggtctaatggtgggattcacgcggcggacgatacaggtgaaattcctgtcgacctgattcaaactgaccactggagtgcagcgacccccacatggaaagccagttctaatggcgcattctgcagcctgacaagttgcagtgcaatcgagcgcggttattctgttgcaaaaacaggggaactgacacctgttgctattacagcggtcaccttcccgttactgattgatgctgcggtaaatgacaatactattcttggttctgatgaaacgatcaaactggatggtaacgtcactatcagcgttcagtatttataagaacttgtaatacagtttttatttttacgcattaaccagttagctataactcggacagattatgccctatgacatggtctgtcttaatcaatctcatcgcaaacagtgcataacatatattaacaatatgtttctgcgttatttatcattattacaggagttttaatttaaatgctcagacacattacattcactgtatttataacaacatcaatgaatactaacaatgccggacaggagtactatcaggcattcgttttatacgatcggttaatgtttcaggaaagctcttcgcatatcttggggaaagtaaatgtaatacgctgttcttaattgttcagtgctcaccccccagagtatagctcattccattattcaacttagctccatataaagggacagataatggaaagcctcagtgaaggaaccacagcaggctaccagcaaatccacgacggtattattcatctggtcgatagcgcccggacggaaacggtacgtagcgttaacgcgttaatgaccgcgacgtaccaggaaattggccgacgaattgtcgaatttgaacaaggtggcgaggccagggctgcgtatggtgcgcagctaatcaagcgactaagtaaggatttatgtctaaggtataagcgtgggttctctgcaaaaaacttacgccaaatgaggcttttttacctcttttttcaacatgttgaaattcaccagacaatgtctggcgaattaacaccattgggaattccgcagacaccgtctgcagaattcccaagcgcaaagatttggcagacgctgtctgccaaatctttccccttgcccaggtccacctacgtccgtttactttccgttaaaaacgctgacgcccgcagcttttatgaaaaagagacgctccgctgtggctggtctgttcgccagctagagcggcaaattgcgacccagttttatgagcggacactactgagtcatgacaaaagtgccatgctgcaacaacacgctcctgccgagacgcatattcttccgcaacaggcgatacgcgatccctttgtgctcgaatttctggaattgaaagatgaatatagtgaatccgattttgaggaggcgctgatcaaccacctgatggatttcatgctggaacttggggatgattttgcctttgttggtcggcagcgaaggttacgcattgatgacaactggtttcgtgtcgatctgctgtttttccaccgccgtttacgctgcctgctaatcgtcgatctaaaagtgggcaaattcagctatagcgatgccggacagatgaatatgtatctcaactacgccaaagagcactggacgctaccggatgaaaatccgcccatcggtctggttctctgtgcagagaaaggagccggagaagcgcattatgctctggcaggtttgcctaacaccgttctggcaagcgaatataagatgcaactacctgatgagaaacgactcgcagatgaactcgttcgaacacaggcggtgctagaggaaggctatagacgccgttaatttcagcggtttcgaattctgcagacagtgtctgcagaatctttaaaacgaactaagttttaagccattaaatcagccttaaccttcaccacaacctttttaatctctccaggctcgccgacaacgcatcctggtttatgcggttcacctggcataaacacggcgaacattcccggttttaagatgatggcttgctcgttatcaatggtgctgcaaagctgataatcatcctcatggtggaactcttcacactgacgcgcagtgcctgccatgccaaacagaatccgttcctcaccgtttaataacagctggatatcaatgtattgctcgtgcaattccgcttttttctcgacggggctttgagtgttaaacgtcatgacattcataaagatattgtcgccctgtaattcgtaacgacccggcgctttttcttgcggtctggcagctaatgccagcgttaacgcgtcctgtaacgcaggatgtaacccagcagacggtaaactctgtacttcacccatcatcataatttttctccctgggccaacagcgcagccccaagtaaacctgcatcatggcggtaatgcgccgccagtaaatcaacatgaaatgccgctggctcctgcgccagatacgtttccaccagcgccagatacccttctgccagaccaacgctgccaccgaccaccacgcactggcaatcagttgtggctttaatatcagcgatcagccttgcaagcgtacgtgcggagcggtgaatcagctgctgcgcctgctcgtcaccctgcccggcgcgcgtgaaaatagttttcgcatccgcgccagccaactccccctgcgctgccgctgcaatgccgcgaccagaagcaatcgcttccacgcaacctgtgcgtccacagccgcagactgggccgtgtggatcggcaagcgtatgcccgatatgccccgccagaccgccagggccggtaagcagtttgcagccgctcactacaccgccgccaacgccggtggaaacggtgataaagaccatatcggttatatcgccatccagcgcctgaaactccgcccatgctgcggcctgcgcgtcgttaatggcaatggtcggcaaattggtaagttgttccagcgttttgactaacggaaagtgtagcaatccaccaagattatgcggattaagcgccagcaagctgccgtcacggattatcccggtgctagcgatggcaacccgctgcgcatgagcttgcaacggagagactaatgcggataaggcatcacgcaaggcttctggtgtctggctggctggcgtaggaagttcacgacgatcgcggatctgcccgtcagcgccaatcagcgcggcggcaagtttagtaccgccgatatcaatcgccagtgtggtcatagcaccgcctttttcatcgctgtgttgtaccactgacaaatgtgctcaagacgcgtgattgcagaaccgaccgtcaccgcccacgcgccgtggcgcatcgcatccgccgcctgagcaggcgtgttgtaacgcccttcggcaatcacccgacatccggcgtcgctcaacgttttcaccagcgccagatccggctcttctggcgtttcaggcgtggtatagccagaaagcgtagtgccaataatttcggctcccagcttttggcatgccaggccgtcttccggcgtactgcagtcggtcatcgccagtaaaccgtgatggtgaatacgtgccagcagcgtttcaacaggcaccggacgcgggcggtcggtgccgtcaatggcgataatgtccgcgcccgcctgcgccagcgcatcaacatcttcaatataggccgtgatgcgtaccggagaatcctccagatcgcgtttcacaattccaataatcggcacgctcaccaccgcacgcgtggcttgcagatttgccacaccttcaatgcgaatggcaaccgcgcccgcctgttctgccgctaatgccatggcggcgacgatttcgggtttatcgagcgggctgtccggaaccggctggcaggagacaatcaggccaccgttagcagcgattttttgatccagttgtgcaagtaagctcatacatcttcccttagcgaaaggcccggtacatagaccgggcaacaggattaacttttggttttgactaaatcgtttttggcgctgccaaacggcacggcaccgctgaatggtttaccgtcgatagcgtcatgagtacgcaacgcttccgggcgcaaccaacgctgaacgcgagaaggcatatccagcccaatcagcaggatcaccacgaacgtcagactgaagctgaggcttgccagcgcagtacccagatccagacgttgagcgatcaacgcgccgatgattggggccagtgcaccgcccaatgcgccaacgttgtaggtaaagcccaggcccgctgcacgctggtcggtatcgaaataaccgccaatcagttttggtaagatcccggcgatcccttgtccaagcatttgctggaagaacagtaacagaccgagcacccagacgtttgcgccgccaatcgcaaataccggaataatcagcagctggctggccagcaggctacaaacgtacgctttgcgggttcccagccagtcaccgaggaagccacctacgcagcatcccaccgccgcgccaaagccactaaagaacagcacattggctacagtatgcgggttataagccagatcggttttcagatacgttggcagcagcgcctgaatcggccaactgtagaggaaagcaaacaacacgaccaccatcagcattacgcccgttggccagcgtttgcctgcactctgcaccataaagctgataaagattgcggcgcataacagcccaagaacagcgacgatcgcggcattttgcaggttaccggcgaagcagaaccacagcgcagtagccgccgccagtgtcattacgatattggcaatgcgatgttcaccacggtagagaatatccaccattgtgcgtactggtgctttacctgcgtgtttctctttccagtcttccgcttccgggatgtttttacgcagccagagagcaaagatgattggcaaaatgccgataaagaacagcgcacgccagccccagaccggaaccaccaggctatagacctgagcggcaacgacggcccccacagagaagccactaatcaaaaaaccactggctttgttacgcagatgttttggccagctttcaatgacataggtggcgctggaaccgtattcacccgccatccccatgccgatgaccagacgagcgataaacatggtgatgtagcctggcgcaaagccgcaggccagcgtcccggcgctgaagagaacgatgctggtgaccattgccagacgacgcccgtagcggtcacccatagcgccgagcatcaggccgccgaaccagcgagagataaaggctgcagagatcagacttgccgcctgcaccgtcgtcagcccgaattcaccttgtacttcggtgagtaccagggcgattaaaacgaaatcaaaaccgtcaagcagatatcccaaccaggcagcggaaaatgcgcgccattgtgcacggttgagatggcgataccacgggatattctgggttgtagtactcattgtgagtctcccgcggtgggcgatgcccacacgctttggtatgaaaattgtagggtacagatgcgtttatttcccctcacccggtaggggcgagcgaggggaaacaactcacccgcgctcttgcatcaactgctgggccagcgccttcagttctggcagatatttttcatctaccggtccaaacggtttgcggcacagcggcacagaaacgacatccatataatggaggacagttttcaggccgcggaatacgcccgttttgatcagtaaatcaatgactttattgcattcagtttgcagtttctgcgcggtctggatatcgccttctttcagcgccttaacgatcccctgatagcgccagcccatgatgttgtaggtactgccgataccaccatcagcgcccgccagcagaccagaggcgaagatttcgtcgtaaccgttatagagcacaagatcaggatgttcacgacggatctgctccatctgatagagatcgccagaggtctgtttcagcgcacctacgccaggcaatgtaacaagtgtgttgatctgatccagggtcagttttaccccactcagggctggaatgttgtacaccaccatcggcaaaccatccgcgctatcaataattgcccgatagtgatcgcagtgttcttcaaagctgaaaggatagtagaacggcgtgacggcggagacggcatcgaagccataacgtttagcgcttgccgcaagttgttggctttcggcggtgctgacgcaaccgacgtgggcgatgagtttaatcttacctttcgcctcttcggcgacgatttccagtacctgttcacgctcggaaaggctttgtacaaaggcctcgccggtgctaccacccacgtataaaccgtcgatgccctgctgaatattgaactgaaccaggcgacgcagactcgctttatccagtgcttgttgttggtcaaaaggagtcaggagtgcagccattacgccacgtaaattcgttgccataaatacctctgaagtgatgcttgtctgataaacgatatacctttatacctgttataccagatcaattaagcaacaccccatacagaaagcttataatgcgatctgcttcactaaagtggcattatttctttttgttggtggtctgaccgaaagcgtgccaggtagcagagacgctgttgagatggctttgcaacgcacgatcggcttcgtcaggatcatgacggcggatcgcatcaacgatcgcaatatgctgttgataactaacgttgttatgttcgtgcagtgcctgatcggtaaccgttgggcgtgcggcaataagccagtcgagcagggcaacgtggatcgccatgaagattgggttaccggggatctccgccagcacgcggtggaaatcaacgtcactacgaatgaatgccgcgttgttatccaggctctgactgttgatttccagtgcttttgccagcaaatcgatttgctcatcggtggcatgttcagccgcatagcgcaccagactggattcaaagaacagacgtaattgttcgaaatgggcaatcccaccgggatgagaaaggaaatctttcgccatgccggaaagctcaccgatgatagtgtccgcagaaggacggctgacgcgagcgcgttcgccgttgtttatttgcaccagacctttgcgttttaacgctgccagcgcttcacgcacgctaggacgcccgacgttaaagaacgccatcagttcgcgttcagacggtaattgttcaccttcgccaaattcacgacggcggatcatctgttccagctcttcttccaccatttcggagagttttttacgcgccagcgggcggctacgcaagttgcgaccaattgcaggactagaatcttcggtttggctatcaaatgcgttcataaggcccattctgtaaggtcagtgtgattaacatcatcagtgacatcctatcacaggattgaaagtaggggaaaatggcagggttttctctttgtgcctcatcattaccataattaacggaataattaactattgcgaaaaattaatgtaacgcagataaaaacatcccgtttgaattatttataagactattcacgagcattatgaatattatgaatgtgttcttacaaaataatcataagcgcatattttttaatgaaaaatcacctcacctacaattaaaaacacgacatccgcaccataaatagccttgcaaaaaatataacatcgttgttttcaatctgccgtttatgggattgaccgttttcttttgacacggagttcaacaatgttcggcataattatatctgtcatcgtattaattacgatgggctatttgatcctgaaaaactacaaacctcaggtggtgctggctgccgcaggtatcttcctgatgatgtgcggtgtctggttagggttcggtggtgtactcgatcccaccaaaagcagcggctacttgatcgtcgatatttataatgaaatcctgcgcatgctgtccaaccgcattgccggattggggctgagcattatggcggtgggcggttatgcccgctacatggagcgcataggggccagtcgcgcgatggtgagcttgttaagccgcccgttaaaactcattcgcagcccgtatattattctgagcgcaacttacgtcatcggccaaatcatggcgcagtttattaccagcgcctccggtctgggtatgttgctgatggtcaccttatttccgacgctggtgagtctgggagtaagtcgtctctctgcggtggcagttatcgcaaccacgatgtccattgagtgggggattctggaaacgaactccatttttgctgcccaggtagcgggaatgaaaattgccacatacttcttccactaccagcttccggtcgcctcttgcgtcattatcagcgtggcgatctcccactttttcgtgcaacgcgcttttgacaaaaaagataaaaatatcaatcacgaacaggcagagcaaaaagctctcgataatgtcccgccgctctattacgccattttacctgtgatgccgttaatcctgatgctcggcagcctgttcctcgcccacgtcgggctgatgcagagtgaactgcatctggtggtggtgatgttactgagtttgactgtgacgatgtttgttgagttcttccgcaagcataacttgcgcgaaacaatggacgatgtgcaggcgttttttgacggcatgggtacgcagtttgccaacgtggtaacgctggtggtcgcgggtgaaatatttgcgaaaggcttaacgacgattggcactgtcgatgcggttatcaggggggcggagcattctggtctgggcggtattggcgtgatgattattatggcgctggtcattgccatttgtgccattgtgatgggctctggcaatgcgccgtttatgagttttgccagtcttattccgaatatcgcagccggactacatgtaccagcggttgtaatgattatgccgatgcattttgccacgacgctagcgcgcgcggttagcccgattactgcggtggtggtcgttacgagtggaattgcaggcgttagcccttttgcggtggtgaagcggacagcgatccccatggcagtcggtttcgtggtgaatatgattgccacaatcacgctattttattaagtcattaaaaagacaaaacaggccgcctgggcctgttttgtattacttcacaacgcgtaatgccggtcgaccaccgcgtggtggctgcggaggttcatcgtcaggatgagtgtcatcatcgtgatctggcttgtcgccatcaataacgctcataacggtttcgttgtctgcgcttgcctcttcatcattcatgatgctggtatcttcatcgtaggcagcttcaggctcaaacatcgtgcctgcgccattttcacgggcgtagatagccagcacggcagccagcggcacagaaacctgacgcggaatgccaccaaagcgcgcgttaaagcgcacctcatcattcgccagttccagattgccgacagcacgcggcgcaatgttgagtacgatttgcccgtcacgcgcatattccataggaacctgcacgccagggagcgtcacatccaccaccaggtgcggcgtgagctggttatccagcaaccactcatagaatgcacgcagcagatagggacgacgtggtgttagctgactcaaatccatacagattaactccggcccagacgcatttcacgttctgcttcagttaaagaagcaaggaaagagtcacgctcaaagacgcgggtcatatagcctttcagctctttcgcacccgggccgctgaactcgatgcccagttgcggcagacgccacagcagcggagcaagatagcaatcgaccaggctgaactcatcgctcaggaagtacggcttctgaccgaagaccggcgcaatcgccagcagttcttcgcgcagttgcttacgtgcggcatctgcttcagaagcactaccgttgatgatggtgttcatcagcgtgtaccagtctttttcgatgcgatgcatgtacagacggctttcaccgcgagctaccgggtaaacaggcatcagtggcggatgcgggaaacgctcatccagatattccataatgatgcgagattcccacagggtcagctcacgatccaccagggtcggaacgctctgattcgggttgaggtcaatcagatcctgaggcggattgtccttttccacgtgttcgatctcgaaacttacacctttctcagccagcacaatgcggacctgatggctatagatgtcagtaggaccggaaaacagcgtcattacgctacgtttgttggcagcgacagccatgaaaacctccaggtatagtcagaatttttactgctaccagccaccaggtggccagtcagaagttgtgttacccaataaggaacgactctctttgttcgaaaatcaaacaaaaaatgagcaatacccgacatttgggcagaaaattggatgatagtttaccagattttgcgaccattgtggtgagtcgatgccggaaatggggaaaaagagatgcgctttagtctgaaatagttgacttagtcccttattggcgatgtggtttttgttttacctgtctgtcaggtggcagcaaaaagcaactttccagtttttacgctgattcagattttagctataaaaaaacccgccgaagcgggttttttcgaaaattgttttctgccggagcagaagccaattaacgtttggagaactgcggacgacgacgtgctttacgcagaccgactttcttacgttcaacctgacgagcgtcacgagtaacgaagccagctttacgcagttcagaacgcagggactcgtcgtattccatcagagcgcgggtgataccgtgacggatcgcaccagcctgaccagagataccaccacctttaacggtgatgtacaggtccagtttctcaaccatgtcgaccagttccagcggctgacgaactaccatgcgggcagtttcacgaccgaagtactgttccagagaacgttggttgattacgattttaccgttgcccggtttgatgaaaacgcgagctgcggaacttttgcggcgaccagtgccgtagtattgattttcagccattgcctataatcccgattagatgtcaagaacttgcggttgctgtgccgcgtggttgtgctcgttacccgcgtaaactttcagtttacggaacatagcacgacccagcgggccttttggcaacatgcctttaaccgcgatttcaatcacacgctcaggacggcgagcaatcatctcttcaaaggtcgcttgtttgataccaccgatgtggccggtgtggtgatagtacactttgtcagtacgcttgttgccggttacagcaactttgtcagcgttcagaacgatgatgtaatcaccggtatctacgtgcggagtgtattccgctttgtgcttaccgcgcaggcgacgagccagttcagtagccagacggcccagagttttaccggtcgcgtcaacaacataccagtcgcgttttacggtttctggtttagctgtaaaagttttcattaaaagcttacccaataaatagttacacgttggtgaacacccaaacgtcttcaattgttgaggttcacacgacaaagtccggcaaacctaccccttcgaatagcctatgccagcacacaaaaagttttgggaaaaaaactttcttgtaacgtggggtcgcaggattatagagaagtcggggtcaaagatcgacccctttttgtgatttgtgacaggttttaacccgccaaatgctcgcgcttcagatactcttcgctttgcatctcttgcagacgactcaggcaacgctggaactcaaacttcagccgatcgccctgataaatttcatacagcggcacttctgcactcaccactaatttgacatggcgctcgtaaaactcatccaccagcgcaataaagcgccgcgcttcgctctccatcaaccgcgtcataactggtacatcaaacaacatgaccgtatgaaagagacgactgagcgcaatatagtcatgctgactgcgggcgtcgacgcacagcgtagtaaaagagaccgccagcgtctggttctcgacgcccattgttgctaatggccgatggttgatttctaacgtcggactattttctcgtttcccccccgccagcgccaaccatagtttatccatttgcgcccgggtttcatcgtgaagtgggctaagccacagatgcgcctgagtgagtgtacgcagacgataatcaacaccagcgtccacgttcattacatcacaatgctgtttaatggcatcgattgcaggcagaaaacgcgcacgttgcaggccatttcgataaagttcatccggcggaatattactcgtcgctaccagggtaataccgcgagcgaacagggctttcatcagaccgccaagtagcatggcatcggtaatatcagaaacaaaaaattcgtcaaaacagagcacgtcagtttcggctttaaagcgatcggcaataatttccagcggatcggtctgcccctgtaaggcagttagctcttcatgcacccgcagcataaaacggtgaaagtgcaggcgctgtttccgctctcccggcaggctttgatagaaaaggtccatcagccaggttttcccgcgtcctacaccgccccacatatataagccacgcactggcgtatgctttgtgtcttcgcgtttaccccacagcttaccgacccgcgccattagcccactcgtcctgggggctggtggcgtgctattgatgagttcctgataaataatttccaggcggctgacggcctctttttgaacgtcgtcgggttgatggctgccttcattaagcgccttcaggtattggcttgttggggtaacgctttgcatgatcttattgttattccttgaataatcggtgcgccgttgttcacggttgacgaaaaaaaggccgttctacactacgcgatatgcagtcgggattccacttctgtggaattaacggttatagtggcataatcagccgcaggcatggagcctgaagccaacaccctacggaaacaaaagacaacgggagatgttcatgacctgggaatatgcgctaattgggttagtcgtcggcatcattattggtgctgtggccatgcgttttggtaatcgtaaactacgccagcaacaggcgttgcagtacgaactggaaaagaataaagctgaactggacgagtatcgcgaagagctggttagccactttgcccgcagcgcggaattactggataccatggcgcacgactatcgccagctgtatcagcacatggcaaaaagctccagcagcctgctgccggaactgtctgctgaagcaaacccgttccgtaatcgtctggcagagtctgaagccagcaacgatcaggcaccggtgcagatgcctcgcgactattctgaaggcgcatccggcctgctgcgtactggcgcgaagcgcgactaatttatttttcgggcgcagccattgcgccctcctcttctctccctccccgactatcatttaatctggtgtctcattgttagccgtctgaaaattcaataacatcaaactgttttgaatctcttttcttatcattcaggtacgagagcaggaataatgaaaaaacaaacccagctgttgagtgcattagcgttaagtgtcgggttaactctcagcgcgagttttcaggccgtcgcgagcattccaggccaggttgccgatcaggcccctctccccagtctggctccaatgctggaaaaagtgcttccggcagtggtgagcgtacgggtggaaggaacggccagtcagggacagaaaatcccggaagaattcaaaaagttttttggtgatgatttaccggatcaacctgcacaacccttcgaaggtttaggctccggtgtcatcatcaacgccagtaaaggctatgtgctgaccaacaaccatgtgattaatcaggcacagaaaatcagtattcagctcaatgatgggcgcgagtttgatgcaaaactgattggtagcgatgaccagagcgatatcgccctgttacaaattcaaaacccgagcaaattaacgcaaatcgctattgccgactccgataaattgcgcgtcggtgattttgccgtagcggtcggtaacccatttggccttgggcaaaccgccacctctggcattgtttccgcattaggccgcagcgggttgaatcttgaaggtctggaaaactttatccagacagatgcttccattaaccgcggtaactccggcggtgcactattaaaccttaacggtgagttaattggcatcaacactgcaatccttgcgcctggcggcgggagcgtcgggattggatttgccatccccagtaatatggcgcgaacactggcgcagcagcttatcgactttggtgaaatcaaacgcggtttgttaggcatcaaaggcaccgagatgagtgccgatatcgccaaagccttcaaccttgacgtgcagcgtggcgcgtttgtcagcgaagtgttgccaggttctggcagcgcaaaagcgggcgtcaaagcgggcgatattattaccagcctcaacggcaaaccgctgaatagctttgctgagttgcgctctcgtatcgcgaccaccgagccgggcacgaaagtgaagcttggcctgctgcgtaacggcaaaccactggaagtagaagtgacgctcgataccagcacctctagcagcgccagcgctgaaatgatcacgccagcgctggaaggtgcaacgttgagcgatggtcagctaaaagatggcggcaaaggtattaaaatcgatgaagttgtcaaaggaagcccagctgctcaggctggcttgcaaaaagacgatgtgatcattggcgtcaaccgcgatcgggtgaacagcattgctgaaatgcgtaaagtgctggcggcaaaaccggccatcatcgccctgcaaattgtacgcggcaatgaaagcatctatctgctgatgcgttaatgtcgtaaaccgggcatcaggcttacgtgtgatgtccggttaactcgtggtatgctgctgccgttcccttttttaatgacgcctccatcatgtttgtgaagctcttacgttccgttgcgattggattaattgtcggcgctattctgctggttgccatgcctagcctgcgcagccttaacccgctttccactccgcaatttgacagtaccgatgagacgcctgccagctataatctggcggttcgccgcgccgcgccagcggtggttaacgtttacaaccgtggtttgaacaccaactctcacaaccagcttgagatccgcaccctgggatccggtgtaatcatggatcaacgcggttatatcatcaccaataaacacgtcatcaacgacgccgatcagatcatcgtcgccttacaggatggacgtgtatttgaagcattgctggtgggatctgactctctaaccgatctggcggtacttaaaattaatgccactggcggtttacctaccattccaattaatgcacgtcgcgtaccgcacattggcgacgtagtactggcgatcggtaacccgtacaacctcgggcagaccattacccaggggattattagtgccacgggtcgaatcggtctgaacccgaccgggcggcaaaacttcctccaaaccgatgcttccattaaccacggtaactctggcggcgcgctggtgaacagcctgggcgaactgatgggcattaatacgctgagctttgataagagtaacgatggcgaaacgccggaaggtatcggctttgcgattcctttccagttagcaaccaaaattatggataagctgatccgcgatggtcgcgtgatccgcggctacattggtatcggcggacgtgagatcgcaccactgcacgcgcagggcggtggtatagatcaactgcaagggatcgtggttaatgaagtgagtcctgacggcccggcggcgaatgcgggtattcaggtcaacgatctgattattagcgtggataacaaaccggccatctctgctctggagacgatggatcaggtggcggaaattcgccctggtagcgtgatccctgtagtagtgatgcgtgatgataagcagttaacgctgcaggtcaccattcaggaatatccggcaaccaattaagtcgtgcgctcaaaacaaaaaaccggagtctgtgctccggttttttattatccgctaatcaattacttattaacgaactcttcgcccagggcgatatctttcttcagcgtatccagcataccttccagcgcgttctgttcaaatgcgctcagggtaccgatagatttacgctcttccacgccgtttttacccagcagcagcggttgagagaagaaacgggcgtactgaccgtcgccttcaacgtaggcacattcgacaacgccttgttcgccctgcagtgcacgaaccagagacagaccaaaacgtgcagctgcctggcccatagacagggttgcagacccgccaccggccttcgcttcaaccacttcagtacccgcgttctggatgcgtttggtcagatcagccacttcctgctcggtaaaactaacgccaggaacctgactcagcagcggcagaatggtaacaccagagtgaccgccaataaccggcacttcaacttcgcctggctgtttgcctttcagttccgcaacaaaggtgttggaacgaatgatatccagcgtggtaacgccgaacagtttgtttttgtcataaacaccggcttttttcagcacttcagcagcaattgcaactgtggtgttaaccgggttagtgataataccaatgcacgctttcgggcaggttttcgcaacttgctgtaccaggtttttcacgatgccggcgttaacgttaaacaggtcggaacgatccatacccggtttacgcgctacgcctgcagagataagaacgacatctgcgccttccagcgccggagtcgcatcttcaccagaaaaacctttgattttcacagcagtagggatatggctcagatcgacagccacaccgggagtcactggagcgatatcatacagagagagttcactaccactaggcagttgggtttttaacagtagtgcaagcgcctggccaataccgccagcagcgccgaggactgcgactttcatcctaaactccttattatattgataaactaagatatgttgctccgctgccgcgaccttaatccacaaaattgccgtttacaatgaccacatctcaagaatgtgtagtcacgcaagtttagcgtttatgcatttaattgccgtaatcaggaacctaacttacgtaattaacagtcgcttatgcattagcgcaacattccaacaggtggtgacaatataccctaccgttcagccaaaacaacatcaatttgataacaattaatttacttttaagcagaatttgcatgccgtgacgcaggcatgtttctcaataacgaaatttgataaaatcccgctctttcataacattatttcagccttcttcagggctgactgtttgcataaaaattcatctgtatgcacaataatgttgtatcaaccaccatatcgggtgacttatgcgaagcagcgctaagcaagaagaactagttaaagcatttaaagcattacttaaagaagagaaatttagctcccagggcgaaatcgtcgccgcgttgcaggagcaaggctttgacaatattaatcagtctaaagtcagccggatgttgaccaagtttggtgctgtacgtacacgcaatgccaaaatggaaatggtttactgcctgccagctgaactgggtgtaccaaccacctccagtccattgaagaatctggtgctggatatcgactacaacgatgcagttgtcgtgattcataccagccctggcgcggcgcagttaattgctcgcctgctggacagtctgggcaaagcagaaggtattctgggcaccatcgctggcgatgacaccatctttaccacccctgctaacggtttcacagtcaaagacctgtacgaagcgattttagagctgttcgaccaggagctttaatctctgccccgtcgtttctgacggcggggaaaatgttgcttatccctctcaaccccctgctttcccctgcgattaatttaacgaatagtgcgttttactgcgacatgtcattcacacaatgaatacataaggtaaaaaaagcacattatgcaaaattcattatctaattgaaaaaactagaattaacgataaataaccgtatttttaattcttttttgttattaaaattcacatttttaacacttagtatcaactgaaacagttagcgcggtattaattagctcaataattagtgtatacttgattttgtgatatgggtcacgaaacaaaggcccagctaaaagattatgtcgaggtaaaaatcatgaaaatcaaaaccactgttgctgcattaagcgtactttctgttctctctttcggtgcattcgctgccgactccattgatgctgcacaagcacaaaatcgtgaagcaatcgggaccgtatccgtaagtggtgtggcgtctagcccaatggatatgcgtgaaatgctgaacaaaaaagcggaagagaaaggcgcaacggcctaccagattactgaagctcgtagcggtgacacctggcacgctacggctgaactgtacaaataaaccctcatcgtcttgtccgacgatattgcccccggttcgggggcttttttttgcgttaatgacgaacattaaaacgcaaatgcccttccagctcttcctctgcctcatcaaacagcaatattaacgcgccaaaacggcgacgcgttttctctcccagatgaacaaattcaatctcaagtggtagcggcaggacatcgttcattaacacatcccatagactgtcgagatcgcgtaccttatctttcgccagaccaaaggtttggctaaagtcacgataaaaatcctcctgactctcaatctcatcaaaatcaaaggtataaatattcatctgttgccaccgtcacgtttcgcggcgagttctgccgtgcatcgctaagtatagccatgaaaaaaccgacgcttttggcgtcggttttgacttaactatcggtcaacgcatgttgatacttatggagcatccccgccagccgatttaccggttccgtcacctgcggtggcgcttgccagatgcgtagcttttcctggtagatttccagttcttccagcaactggccaaagtaccgacgacgtttatcatcgctacgggcagatatcacatggtctgctgtgcggcgcatttgtcggtgaaacgcgcttaaatcctcgttaaccgggatcggtgcatcacgcaggcgctggtgcgcgataatcatcgtcagcgccaggcgaaatttcggcaaatcccctgggaacttattcatcagcaaaaacagctgctgataaagtgccgggaggtggttctctttacgacgtgccacattggtagtcatcgcggaaacagcggcagaaacaaactgattaagcagtacacgtccggtcctgtcgcggcttttatcccgcaccagcaaaataacggtgaacgcgagcacacagccgacgatttgccctaatgcgctgtcgagaaactgactgaaatggaaagtcatcgggttatccagcacgataatatttatggtgctggccagtgcccccatgctgcccagtcgccgtttctgtacttctataccgaggaagaatcccagcactgccaggctaatgcacagcagcaacatgctctgttgggtattagggataatcaccaaaaagtagagcagccctaacggcagcgcggccagcgtcccgtagataaagtcgatcgccaccatgcgtggattcggcaaacgcattgccagactcgtcactaccgcaatcatcaccattgcaccactgccggaagtccagcccgtccacagccagaaaagcgtgcccagaatgcaggaaagtgtggttcgccagaagttacccattgcatgatgacgttcggcactctctacttttacttccggttcgccttgcaggatctcttcttcggtggcgttgatttttgtgttactgataacgccgcgcttgagaagctgataacgcgttgccgccgcgacccagctataaatggtgacaggcgtttcccgttccccggtccaggcgataactctccgcaggcgtttgagctgcttgtggacgtcctgcgcggtttctaccggcgtgtcaaaaaattcgcggaaagtatcagtgatcaattccgggcgcgtattctgaataagataagtttcgcaggattgggtaatcagcgtcaggcttagcgtattgatcgcttttaaacgtcgattggcccgcgcccagcgggaagattccatattcaggttgctgcgcatgccttgtagcgccgtggtgcgtcgcaccaggtcgccccaggctttatcgacaacttcaccatcgccatgcttgatacagagttgcattaattgatattgcgcgaccagcaaactttccagctctcgatccacttcttgtttgatgcttcgcggagaaaagagcaaatccgccataatcgcacacacaataccgataacgatctcgctacaacgttcgacggcaaactgcggcgtaagcaatggttccggctgaatggtgatcacaatgatcagcgcggtataaccggccagcccccacgcatagctgttttctattcgtaccaggctggatatccaggtacaaaaaccggcccagatacagcacaccagaatcatcaataatggtgcgcggatcatcgcaatgatgatcaccagtccggcaatacagccaataaatgtgccgatgatgcgcaaaaagccacgatagcgaatagcgccagaatacggttcacctcccgcagcaaaggccgtaccggcggcaacaatcgccgctgtcagtaccgcccagcgtggcgtttccagctggaagtgaaagccaacaaacagcgccagtacaatggcggtcgccagttttaccgcaaagcgaatatgttggttagcaatggagaaaatacccatcgtgattaaccaaactcacgcaggcgatgggccattttacggaagaagctatcctggctttcgtcgcgatcttgtttgccagtgaccaccactgtagcagtggtgcccgcaggccagatgttctcttgctggttgtcgagacgaatacgaaccggaacacgttgcgcaagacgcacccattcaaggttagagtctatagtcgccatccctttgtcgtcacgcgtgctgctggcgttggtgacccctgcggcaacactatcaacagtccctttcagcactttgttactgccaagcggcgtgatctctgcacgataccccggacgcaccccttccagcttagtttcttccatataggccagtacatagaaggagttctgtttcaccagcgcaaccgccgtacttcctcgagtaataaactcaccggtatagacgttgaggttggtcacccagccatctgctggcgcgcggatcaccgtgcgttcaagatccagttttgccagatcgcgggtcgcctgcgctttcgctaactgatgcagaaccgtttgtagtacgttgttggcctggtcgatctcttcgcgagacatcgcctgcacaccgagacggttacgacgtccggcctcctggcgtttctcctgtgccagtacctgataataagcaacatcggcttgcgcttcctcaagcgccttttgatagcgcggctggtcgatggtgaacagtatctgtccttttttcaccagctggttatcatgaacattcacctgggtaatgagtccagaaacgtccggcgcgatcgcaacgacgtcagcgctaaagcgcgcgtcacgcgtccagggggattcggtgtaatagacccaggcattaaaaattgcgatgaaggccagaatgactaatacgaccgtgatggccgtacgggagaattttcttattagtgttttcacttcaacctcaaacgaacagtcggcttatcaaataaaacaagcagcaatagagcgcggtgttgaacaacgccggatgccagacaaagtcgtagatacctgttggcacaagtacccggcgcaccagccagaaaatcgccagacttaaaagcaattcaaaaaatatcggtgggaaggacagcccaaacaccacgataacgggaaacagactcatgttgaccttggttgtaaagagagagcaggcgttattattttcagcatctgtcgccgcagagaagggcatggaaagccgggcgagagcaacattgctgtagattgatatttaatatattagcgtaactgttatgctgttatctatattatgtgatctaaatcacttttaagtcagagtgaataatggaacgactaaaacgcatgagcgtgtttgccaaagtagttgaatttggctcttttaccgccgccgccagacagctacagatgagcgttagctccatcagtcagacggtaagtaaactggaagatgagttgcaggtaaagctgttaaaccgtagcacacgcagcattggcctgaccgaagccggtagaatttactaccagggctgccgtcgtatgcttcatgaagtgcaggatgttcatgagcaactgtatgccttcaataacacccccatcgggacgctacgcattggctgttctagtactatggcacaaaatgttctcgccgggctgacagccaaaatgctgaaagaatacccaggtttgagcgtcaatctggttaccggaattccagcccccgacctgattgccgacggtctggatgtggtgatccgcgtcggcgcgttgcaggattccagcctgttttcccgccgtctgggcgcgatgccaatggtggtgtgcgccgcgaaaagctatctcacacaatacggcataccggaaaaacccgccgatttgagtagtcatagttggcttgaatacagcgtgcggcccgacaatgaatttgaactgatcgcaccggaagggatcagcactcgcctgatcccacaaggaagatttgtgactaatgatccgatgacgctggtgcgctggctgacggcgggtgccgggatcgcctacgtgccgctgatgtgggtgatcaacgagatcaatcgtggggagctggagatcctgctgccgcgttaccagagtgatccacgcccggtttatgcgttatataccgaaaaagataagctgccgctgaaggtacaggtcgtgatcaacagcctgacggattattttgttgaggtcggtaaattgtttcaggagatgcacgggcgcgggaaagagaagtaattcatattgtactgttacgttgtacaaacctgtgccaacgggttcccctcaccctaaccctcaccccaaaggggcgaggggaccgttcgtgcacgtagaaagattaattatccttctgaaaatagtgaaattattacgcagtaccgccaacagtcaggttatcgactttcaacgttggctggcccacgccaaccggcaaactttgcccttctttaccgcagacacccacgccgttatccagtttcaggtcgttgccaaccatgctaatctgctgcatggtttcgataccggaaccaatcaacgttgcgcctttcaccggcttcgttactttaccgttttcaatcagatatgcttcactagtggagaaaacgaatttgccggaggtgatatccacctgaccgccaccaaagttcggtgcatagataccgtactcaacggattcaataatttcctgcggggtgcttttacccggcagcatataggtgttggtcatacgcggcatgggcagatgggcgtaggattcacggcgaccgttgccagtcggcgtcatccccatcaaacgcgcgttgagtttatcctgcatgtagcctttcagaatgccgttctcaatcagcacgttgtactggcctggcgtaccttcgtcatcaatcgccacgctacctcggcgatcgaccatcgtgccatcatcaaccacggtacacagttcactagccaccagctccccgacctgtccactaaatacactagtgccacggcggttgaagtcgccttccagaccgtgaccaaccgcttcatgcaacagcacgcccggccaacctgcgccaagtactaccggcatggtgcccgctggtgcagcaacggcagaaagattgaccagcgccatacgcactgcttcttttgcccatgcatccgcacggacttcgccgtcgagatcggcaaggaagaattcataaccaaaacgaccgccgccgccactggcaccgcgttcgcgtttgccatcttcttcgacgagaacgctcacggaaagacgcaccagcggacggacatccgccgctagcgtgccgtcggtggccgcaaccaaaattaattcatagacaccactgaggctggcagtcacttcctgtacgcgcttgtccgcttcgcgggcaaccttatcgacgcgacgcaggatatccagcttctcttcacggctcatgctttgcagcggatctacgctggtatacaacgggctatgctctaccgcgcccagcgtctgtactttaccatcaccactatcacggacgatggtgcgcgccgcttgcgcactctgttccagcgccagcaggctgatttggtcagcgtaagcaaatccggttttttcaccgctgattgcacgcacaccaacgccctgatcgatgttgtaagaaccatctttaataatgcggtcttctaaaacccaggattcgtgatagctgctctgaaaatagagatcgccataatcaaggcgacgttcggccagttgaccgaggatcgcgaacaagtcctgatgtttcaggccgttcgccgctagcaattgttcacttaccaggttaagactcatcgtttttgctactcgttagttactgcagtagaggattttttacggctgccggatgcggcgtgaacgccctatccagcctacggttatgttccggtttgtaggcctgataagacgcacagcgtcgcatcaggcaacggctgtcggatgcggcgtaaacgccttatccgacctacggttatgttccgtttgtaggcctgataagacgcacagcgtcgcatcaggcaacggctgccggatgcggcgtaaacgccttatccgacctacggttatgttccgtttgtaggcctgataagacgcacagcgtcgcatcaggcaacggctgccggatgcggcgtgaacgccctatccgacctacggttatgttctggctcgttggcctttggcaacgattatcctatgagattggggcaattacgcgccctcgtcaaatcattgcgctttttctttacgcggttggcgcaacacttcgttgatttgcggatcgtccagcggaccgctaatgtgatagcgcaaaatggagactttgctccacagcggccccagcactttactggcggcaaacactgccgcgccaacaatggggttaaccgcaaaagccgcagccacgcccaccgtcgcagaaatctctggtgcgacaaccgcttccatattcaggtcgcgacgtaccagatttacgctccctttcatggcgatatccgcctccaggccatccaccagcgtgtcgtcggtgtgcataacgccgtctttaatccacgcggtgctgcgaatggagtcaaaatagaacccttcgccaaaagtgtctctgaaatcaaaacgcagcttacgcatcagggcatctacgctcaataagcgcagcaattgcccggcatgtccggtattgatttcggtaatttcgcctttacccagttgagtatgaatgatgccattcaacgtcgcttcatctggctgccagggtgctttgcgccagtgtaaatcgtaatccacattaaaactgctctggcgtatgggcgtcgtgacaccaaaaaattctgcggcggcatcaattttctgcccgcgcagttttcctttcaggctggtacgttcattccccggattattaacccattcaccatcggcagtaagccggctgaaaccagtatcaatcagtccattggtcagcgttaacgtatcgccagaaatggtgatatcactgtcaatgcgaccgaatttttgcccccagaaccagcactctgtgcatcgtatttgggcgtccggccagccacggaagttaatgcgctccgttgtcgggaaaggactactcggcgtactatcaccacgagttttcgccacgctcgggttgtaataaagatatttgatattcgccagccacggcgcgttattacgcatcgctagcgtggcgttgatttcacgcccttgcgcttcaaccagggtgccatttgccgtcggttggctaacaatactcaggttattccattgctgatttcccagactcaacataggcgtacgtaacgttatgtgttgtgggaaactcgctgcaccaccgacactctccgcagcgcctttctggaacagggccagccactcggcaccattcatcggcggcatattgagttcaacgccactttgttccggcaacggcgggagcgttttactgtctgccgcccaaatagcacgatcgagcgtcagcttttgaccgagcaaccagcggctattgaaatgattatccgcaccagcctgtccggttaattcaaagctgttgagattgccatcaaccttaacgtttaccgctagtggttcacccgcaggtttggctaacggactaggtaagtgactgctcacattctttagatcgccgttcagctctatgttataggtcgcaccagcatgataaggcagatcaatgcccactttaccatcccacgccacgctgccactcaatgcttcgttcaccgcttcaggcagaacgccggttttcgccggttgccagttaccgttgaggtttaccgctacctggtaggcttttgccccttctttggtggaaaaatccacgttcaacggctgattaaaccagcttgctgtcagtggttcactttgcagatcgctattgataaagctgaatttaccgctcaaatttttcagggtgctgtcgagtggtttgataaacagactgttattacgcagcgtcacttcacctttcgcggttaccagttcgccgttcagcgggatatcaagatgtaagcgagcattcacatcgccgtcgagctggagttcttgcagggtcgcacccagagaatctttcagcggtgtctcatcaaagtaagggccaacggctttacccggacctttaatgtcagcgtcaatcagcagtttttctttactgtagtcagggatcactgcggtaagattactcgcgcgcacgccgcccagattaacgccatcggttttcatccataaaccgtcgttaataaagtccagttcaatatcaaggttagttaatgcaggccagtccggctggaaggcaaacttcgcgttgcgcagcggcaccagcacttcaaactgaccttcgttgtgtttataggggaagagttgcggattgccaccataaaccagcgtcgcgttatccgcttcaccgccctgaatcgcgccacttaagtaatcaaccaggtctttacccatcaagttttccgggaaatagcgccaggcttgactaccatcatcggtactgatgccagccagaatacccagccagggttcatcgttagcaggttgcaggtaacgaaaaccgccgcgcgcatggacggctttggctttaacgtcaatattacgcccatccagctggaaacctttgttattgttcagccagcttatagttgcctggccgtcggcgatttctagtggcgcacggaataccgtttcgtaaggcatctttgcctgcttcatgctcgcggtaagcaaaccattttcaacgctgccggaaagcgtcccggagaagtgttccgcacccggtaataatttccattgcttccaggccagatcgctccagcttgcctgaaaacgggtcttgtctgccgcctgaagcgggatatccagcgccagagtgttaatcttgccgctcggttgtgtggagcgccaaacatcacccagtgcaggactaagtttcgcggccagcgggcgtatgccctccaggcctgccagctccagattactggcgcgaatccggagttcgtcactgcgtttattgtctttgccgccaacgtcctgttccggtatccaggccagcgtcaatgctccgctcggccagggtttgccgtccatcgtgatccgtgtatcgggaatagagaactgccagcccggattttcacgcgtaatatgcgcggtcagattatccacgctcagcgtatgcgtttgcttctcgcccaaccagctggcaccgccctgtttcagccagacgtcaccgccggttacatcgcctttgtcgatcgtcatccagccttcaagggagaactgtgccgtttccagcgcaatattgtcctgcatccatttaccgagccacggcttcaggtcgatgtcatccgcctggagccagacgcgaccattgcttaacaacccctcatcatcgcgcaaatccatgcgcacctgcatcacgccgtgctgtccggtaaggctggagaggcttaccaggccttccgcacggtgtcgacgtggatcgttcagccaggtgagttgtgggatcgccagctcggcgcgctgaccggatggcgtcaggaaactgacttcactgtcgcgaagatcgaaatggtcaaattgacgaagaaacagatcgctgatgtgactggcttccagactgtcatcactaccaccgctggtgataggagtgttggtgcgaaagcgcagctgccagaaagtgaggtcgcgaaactgccagcgcatatgtaacaggctctgccagacatccagcgccagagtaacgcgtttaacgctaaattcgccgccatcttttagttctgcacggatgtcgtgtgcttcaagcgtcgggccaaaattctgccagctggcactgagctgactggcttctaccggcatgccagtcgcggattctattttgttgaggatttccggacgccaggcgtcaagatgcggtaaagcaatacgcaggccgctaaccagcagggcagcgatcacaacgagcgcggctccagtaagcagtaaaatccccggcaatcgcctcacccgtcactccttgtctgctaaaaatgtgactcaaaaaccctttgccggatggcggcccagcatctgtttacatcattacgacgtcaaactgctcctggttatagagcggttcaatttgtactttaacctgtttgccaacgaaaatttccacttccgccaggctgtgactctcttcgcctttcaaggcttcagctactgccggagaagcatagaccaggaaacggtcggagtcgtaagcatggtggacacgaacaatctcgcgcatgatttcatagcataccgtttccacggttttcaccgttccgcgaccgtggcaggttgggcattcgttacacagtacgtgctcaatgctttcgcgggtgcgtttacgcgtcatctccaccagccccagcgcgctaaaaccattaacgctggttttcacccggtctttgctcaacgcctgctccaggctgtgcagcactcggcggcggtgatcttcattattcatatcgatgaaatcaataatgataatcccgcccagattacgcaaccgtaactggcgagcgatagcctgcgtcgcttcaatattggtattgaaaatggtgtcgtccagattgcgatgaccgacaaacgctccggtattgatgtccacggtggtcatcgcttcggtctggtcgataatgagataaccaccggatttcagttctactttgcgttccagcgctcgctggatttcgttttcgacatcaaagagatcgaaaatcggctggcgtcctgtgtaatgctccagcttgcttgtcatctcgggaatgtactcgctggtgaactcaagtaacgcttcgtaagtcaggcgactgtcaacgcgaatgcggtccagttcggcatcggcgaaatcacgcagaacacgctgcgccagcgccagttcgccgtacagctgataacgggtctgcgggcgttttttacgctccataactttggtccagacgcgtttcagataagcggcatcggaggccagttcagcctcgccaaccccttccgctgcggtacggatgataaacccgccctgctcgtcgcaatactctgcgaccacttttttcaggcgttcacgttcactttcgctttcaatacgttgggaaaccccaacgtgagaagcccctggcataaacaccagatagcgagaagggagcgtgatatcggtggtcaggcgcgcacctttagtgccaagcggatctttcaccacctgcaccatcagatcttgcccctgacgaaccagttcgctgatgtcgcgcaccgtgaattgcttttgttcttcacccgccacacattcggtgtgcggcatgatgtcggatgcatgaagaaacgcggctttatccagcccaatatctacaaaagccgcctgcatacccggaagtacacgacttacacgacccttgtagatattgcctactattccgcgtcgcgcctcacgttcaatatgaatttcctgcagaataccgccatcaatatacgccactcgcgtttcgctaggcgttacgtttactaacaattcagccgtcatgtttatcccttttctcacgcagtgcgttaaaattacttaataattcatacgtttcaaccagcggtaagccgactacggcgtgatagctgccatttatcttcctgacaaaacagccacccagcccctgaataccgtatgcacctgctttatctaacggttcatcgctggcgacatagcccgcgatgtcttcgtctgttaacgttctgaaagtcacatcggtgaccaccaggcaatcgagaatgtgctggctgtcggccaacgccactgctgtcatcacctgatgggtctgaccgcttaatttgcgcaacatctgcgccgcatgctctgcgtcgcgcggtttctccagcacttctccgttcaggataacgatagtatccgcacccagcaccgggagatccttcgccgtttgcgcgacacctgcccgtgctttctcgcgcgccagacgcacaacatactgctgcgcgctctcctgcggctgacgctgctcctcaatgcccgtaacaatacgttcaaaggtcacgccaagttgcgcaagtaactcctgacgacgcggagaaccggaagctaaatacagagaagtcatagaaacctttattgcactgcaaactgctgacggactttgcgcatcagcaagaaaatccacggccagagcaccccattgactacactactccagaacacttccggtctgaaagagacgttaatcactaaaaactctgcccagaaaacaataatatccaccaccaggctaagcaacatgacgaccagcgcctgctgccataatgcgaggttgcggaaaagctggtatttcagcgccaccaggtaagcaatgatgctcatcgccaatacgcgtacgccaagcgtgctgccgctgatcagatccagtatggcacccatcacaaaacctgtgcccacatttacgcgatgaggcaaggccaggatccaatacaacaagatgagtaacacccagtttggccggaaaacaatcaggttatccggccagggcatgatttgcagcaacagcgcaatgaggaaagagagccagattacccagcgtccctggctacgatagctcgccactattgccctcccggcgcacgttattgccctcccggcgcacgcgcaggcggttgagcaccactttgcggcggcgtagccctttgtggagagcgattagcagcaggctgtgtcggcgcagcaggcgcagtagctgcatttcctgtcgccggttgctgcggagtcggctgagcgatccccgttgccggttcaggtaactttggccccatcgcgtctgggctaggcaatacctgcggcatcatctgcatcagacgttcattagcaacacgatgcacctcttccggcgtcatcgggttagcgccgttacgatctgccccccacagcagcagcagataacgcaaacgttgcagccctgcagtcggacgcgcctgaatcacagtataagcgcgctgggtatcgagttttacggaagagacaaccgcgaccggatagccttccgggaaacgaccgcccagaccggaagtcaccagcacatcaccaacacgaatatccgtattcgccggcagatgctcaagctgcaaatcatccgtacaaccgttaccggctgcaattacgcggatatcgttgcgcagcacctggattggcagcgcgtgggtcgcatcacaaatcagcagcacgcgactggtcagtttagcgacggccaccacctgaccaacaacacctttgtcgctgatgaccggctggccttcataaacgccattaacgctacctttatcgataacaacttgatcgctataaggatcgttaaccgtggagataacctgagtcaccattttctgctcatcctgacgcagcggggaacccagcagctcgcgcagacgcgcgttctcctgtttgtattgtccaagcatcagcagttcactgtttttcagcaacagttcctgacgtaacgcccggttttcaagttctaattggtcacggctggccagcgtctggcttacgccatccagcaattcacgaggagcattggaaacaaagtagaaaggactgacggcggtatccatataagtacggatttgactgaacgtccccaggcggctgtcggcaataataatgccgagcgccaccagcaccgccagaataaggcgaatctgtaggctcgggccacggctaaaaattggcttcataagttatgcgtattctcgtatcagaccaggcagggtaaacagacacttcccctgcctgcatccgattactcttcgctgaacaggtcgccgccgtgcatgtcgatcatttccagcgctttgccgccaccgcgcgccacacaggtcagcgggtcttcagcaacaacgactggaatgccggtttcttccattaacaaacggtcaaggttacgcagcagtgcgccaccaccggtgagcaccatgccgcgctcggagatgtcggaagccagttccggcgggcactgttccagtgcaaccattaccgcgctcacaataccggtcagcggttcctgcagtgcttcgaggatttcattggagttcagggtaaaaccgcgtggaacaccttctgccaggttacggccacgaacttcgatttcacggacttcatcgcccggataagcgctaccgatttcgtgcttgatacgttctgcggtggcttcaccgatcagagaaccgtaattacgacgcacatagttgatgatagcttcgtcgaaacggtcaccaccaatgcgcacagaagaggagtaaaccacaccgttcaaggagataacagcaacttcagtggtaccaccaccgatatcaaccaccatagaaccggtcgcttcagaaaccggcaggccagcaccaattgcggcagccatcggttcttcaatcaggaagacttcacgggcaccagcgccctgcgcggattcacgaattgcgcggcgttcaacctgggtcgcgccaaccggcacacaaaccagaacgcgcgggcttggacgcataaagctgttgctgtgcacttgtttgatgaagtgctggagcattttttcagtcacgaagaagtcggcgataacgccgtctttcattgggcgaatggcagcaatattgcccggcgtacggcccagcatctgcttcgcgtcatgacctactgcagctacgcttttcggactaccggcacgatcctgacgaatggccaccacggaaggctcattcaatacgatgccttgtccttttacataaatgagggtattcgcagtacccaggtcaatggacaagtcattggaaaacatgccacgaaattttttcaacatactaagggataatcctgaaagctggggcggaaaagaaaatccgcttactttaccaaccacacgcagcagcgacaaggcgcaaaaatcatctgctacggtgaaaattagtgcagttcgtttcctttgttacaaatctctgcctgagtccagaaaggcttaatgcatcagcagcattcctcgcctgtttgcaaccgcgtaaggtcattcatctgcatatgtgctgcaacaatctggcgagcagacaagcacactcccatgagacgcagcgcgcattattctacgtgaaaacggattaaacggcaggttaaacgctgtatctttgactatattttttcacgttagtatcaagtggctgactggacgcgaaaaaatccccttgcccgcctgtaacaccgcgctgaatcagggtctgccactcgcttcggctacgcacgccggtggcgtaaacctgggtgctggtcccggagcaggcttccaccaggctttgaaccagcagctggttctccgttcgcttctcaatgtttctgaccagccccggatggagcttgagtaactcaacattaagttctttgatccaactggtacttaccagcgtcaaaccagcctggttgacggctacccgtacccctaaagcattcactaaacgaataacaggttgtaaacgactgatatgttgacctacatcggcctctgcaagttcaataattatgcgttttcgttgacttttttcacattgcattaacgtatcgcgcagccaacgctgaaaacgcgggcgaatcaggctctcaacggtaacctgaatcgccagattttcctctggccagtaacgcaatagtggaataagacggctgatttgcagacggtcatactcttcgcttaagccaaactgcaagaccatcggcatatgctccgcgctgctaacctcttcattaccatcgaagatgcggcacatgagttcgcgatgatgaacctgaccttcgcgagtaaccgccggtttttgataaaggcgcgggccgccgcgactgagcatttgctcgataagcgtacgccagcgaacattaccgcgtcctttttcaggcaagctgtcatcgtaaatagcccagctattgccgccctgcaatcccgcattacgcgtggcagactctgcatgttccattacctgctcggtatcctgaccactacgccaggcgcagataccaatgtggatcatatcgtcgcgatcgagcattttattgttcggcaaggtatcaacggctttgattaactgaccggcgatgctctctgcctcttttaacgtccggtgcggtaacagcgcagcaaaatcactgcggtggtaacgcgccagcagtgcgccagggtagcgcatcataaatgtgctcagcagattcgtcagagtgaagaactgttcttcaacctggctgtgcccccaggtatcgctcaacatattgaaatccggcagacgaatcatcatcacgatcccgtgggtacctactttctcctgatcttccagtaacgttgctaactgattatcgaaaaagagtcggttattgaggccggttttcacgtcctgggcggcataagagcggatcagcgtatcaagacggctgtgttgttcgcgtgcgttctgaatttcacgaagcagcgtatccagcgcactgctggttctgggcggccattcatagatggttcccaacacattagagccacgctcaccgtttaagatacgagtagcccgggtttccagcaattcttgcccggcaagttgccgttgtaaccagcgtaccgccaggaagagcataacaatgataaagccaatcgcccccgtgagcggcgcggtggtcatcaagctatggaaatagttgcccatcggatcctgataaaccagacgcaagctcatccccggatgctttatcaacggaacgctcagttcgcgaaacagatcgctggagccaactggacgataactaccatttctggccagggtataaacctgtttatcaccatggagcaggtctacacgaacgatatctgcgctcatcattaattcggtaatttgtggccttaatacgctgaagtcattgctcacaaggtgggtatcaatcgccgtcgccaccgcctgaacgcgatgactaaacttatactgaatggcgttgtagaaacttaggctacagcccagcaaagtcacaaaaattgttaacccggtgagcagcgtaacaaaggcgctaaatttcgtcgttaatctcatccttgtgttaactccgatagtgaggaagcgggcatactagcaaatcagatttatctcgcaatttattgcgcttcatcggctttgcttttccattagcgagtatagtcttcagaaattattttccaatccatcatgcacatgaggaccacttatgcaggcgttacttttagaacagcaggacggcaaaactctcgcaagtgtacagactctggacgaaagtcgcctgccggagggcgatgtcacggtcgatgttcactggagcagcctgaactataaagatgcgctggcgattaccggtaagggaaaaatcatccgtaattttccgatgattcctgggatcgattttgccggaactgtacgcaccagcgaagatccgcgttttcatgccggtcaggaggtgttactcactggctggggcgttggtgaaaaccactggggtgggctggcggagcaggcgcgagtgaaaggtgactggctggttgccatgccgcaagggctggacgcgcgtaaagcaatgattatcggtactgccggttttaccgccatgctgtgtgtgatggcgctggaagatgccggtgttcgcccgcaggacggggagattgtcgtgacgggtgccagtggtggcgtcggcagtaccgccgtggcgctgctgcataagttgggttatcaggtcgttgccgtttccggtcgcgaaagtacccatgaatatctgaaaagtttaggtgctagccgtgttctccctcgtgatgagtttgccgaatcccgtcctctggaaaaacaagtctgggctggggcaattgacaccgttggcgacaaagtgctggcaaaagtgctggcgcaaatgaattacggcggctgcgtggcggcctgtggtctggcgggtggttttactctgccaaccacggtcatgccatttattctgcgtaatgtccgtttgcaaggggtggatagtgtaatgacgccaccagaacgccgcgcacaagcctggcagcgactggtcgccgatttaccggaaagtttctatacccaggcggcaaaagagatatctctgagtgaggcaccgaactttgccgaggccatcattaataaccagatccagggtcgcacgctggtgaaggttaactaaccatttagcagggaataataagagagggaactcattttgaaatcattattcaatcggttaacgggaaaagcggttagccggacagctttcgtcgaacaccttggtcaggaagttatacaacatcatccaaactggaaagtcatgatttcgactgaccacaaattgatgcgcattgatactccactaaacagctattattgatacgcctccgtcgcctgttaggtttatgttgctttgcctgggcgacgctacgcttagccccttacttatttctggtaccatggggtgaataatctgattttgtttgactacaaattaatcactcgaacctatttaatgctgagcattgtcaatcggttaattttgcgtgctttagcattcacatctatccagacgatgcagtgaaaattgggtaatccccagcaaccgctgcgtaatgtcgtctatcttgtcgcgatcctggcatccctacattatttgtggtctgtgaagattatctcattgcagcccctcatcttcgcagggctggcttttcagcttttcaccttacgttataagaagttccgtcgatgatggcgctaatttcgtgaattgtgcggcttgttgcaaattacacggtgttgaaggttatttacatgttagctgttgattatcttccctgataagaccagtatttagctgccaattgctacgaaatcgttataatgtgcgacctcgtcctccctgacgcagtttttgcgctgcggaaaaggtgacattggcgcaacgaaggtatattttgttttttgccggaggatagcagcagatcgctgcacaatgtccgtcaagtctaacattgacactctggggcaaaatagaccggcgtcccggcctgctggaatttatcgctatgcatacagctgtcggggcatacgctttacagacggcggtgaaacgcctgtcacaatcacactaaacaaagagtacggaacccactcatggatattcgtaagattaaaaaactgatcgagctggttgaagaaagtggcatctccgaactggaaatttctgaaggcgaagagagtgtacgcattagccgtgcagctcctgccgcaagtttccctgtgatgcaacaagcttacgctgcaccaatgatgcagcagccagctcaatctaacgcagccgctccggcgaccgttccttccatggaagcgccagcagcagcggaaatcagtggtcacatcgtacgttccccgatggttggtactttctaccgcaccccaagcccggacgcaaaagcgttcatcgaagtgggtcagaaagtcaacgtgggcgataccctgtgcatcgttgaagccatgaaaatgatgaaccagatcgaagcggacaaatccggtaccgtgaaagcaattctggtcgaaagtggacaaccggtagaatttgacgagccgctggtcgtcatcgagtaacgaggcgaacatgctggataaaattgttattgccaaccgcggcgagattgcattgcgtattcttcgtgcctgtaaagaactgggcatcaagactgtcgctgtgcactccagcgcggatcgcgatctaaaacacgtattactggcagatgaaacggtctgtattggccctgctccgagtgtaaaaagttatctgaacatcccggcaatcatcagcgccgctgaaatcaccggcgcagtagcaatccatccgggttacggcttcctctccgagaacgccaactttgccgagcaggttgaacgctccggctttatcttcattggcccgaaagcagaaaccattcgcctgatgggcgacaaagtatccgcaatcgcggcgatgaaaaaagcgggcgtcccttgcgtaccgggttctgacggcccgctgggcgacgatatggataaaaaccgtgccattgctaaacgcattggttatccggtgattatcaaagcctccggcggcggcggcggtcgcggtatgcgcgtagtgcgcggcgacgctgaactggcacaatccatctccatgacccgtgcggaagcgaaagctgctttcagcaacgatatggtttacatggagaaatacctggaaaatcctcgccacgtcgagattcaggtactggctgacggtcagggcaacgctatctatctggcggaacgtgactgctccatgcaacgccgccaccagaaagtggtcgaagaagcgccagcaccgggcattaccccggaactgcgtcgctacatcggcgaacgttgcgctaaagcgtgtgttgatatcggctatcgcggtgcaggtactttcgagttcctgttcgaaaacggcgagttctatttcatcgaaatgaacacccgtattcaggtagaacacccggttacagaaatgatcaccggcgttgacctgatcaaagaacagctgcgtatcgctgccggtcaaccgctgagcatcaagcaagaagaagttcacgttcgcggccatgcggtggaatgtcgtatcaacgccgaagatccgaacaccttcctgccaagtccgggcaaaatcacccgtttccacgcacctggcggttttggcgtacgttgggagtctcatatctacgcgggctacaccgtaccgccgtactatgacagtatgatcggtaagctgatttgctacggtgaaaaccgtgacgtggcgattgcccgcatgaagaatgcgctgcaggagctgatcatcgacggtatcaaaaccaacgttgatctgcagatccgcatcatgaatgacgagaacttccagcatggtggcactaacatccactatctggagaaaaaactcggtcttcaggaaaaataagactgctaaagcgtcaaaaggccggattttccggccttttttattactggggatcgacaacccccataaggtacaatccccgctttcttcacccatcagggacaaaaaatggacactcgttttgttcaggcccataaagaggcgcgctgggcgctggggctgacccttttgtatctggcagtttggttagtagccgcttacttatctggcgttgcccccggttttaccggctttccgcgctggtttgagatggcctgcatcctgacgccgctgctgtttattggactgtgctgggcgatggtgaaatttatctatcgcgatatcccactggaggatgacgatgcagcttgaagtaattctaccgctggtcgcctatctggtggtggtgttcggtatcagcgtttatgcgatgcgtaaacggagcaccggcaccttccttaatgagtatttcctcggcagccgctctatgggcggtattgtgctggcgatgacgctcaccgcgacctatatcagtgccagtagctttatcggcgggccaggagctgcttataaatacgggctgggctgggtattgctggcgatgattcagcttcctgcagtctggcttagtctcggtattctcggcaagaagtttgcgattcttgcgcgccgctacaatgcagtgacgctgaacgatatgctgtttgcccgctaccagagtcgtcttctggtgtggctggcgagtttgagtttgctggttgcgttcgttggtgcgatgaccgtgcagtttatcggcggtgcgcgcctgctggaaaccgcggcgggtattccttatgaaaccgggctgctgatttttggtatcagcattgcgttatataccgcctttggtggctttcgcgccagcgtgctgaacgacaccatgcaagggcttgtgatgctgattggcaccgttgtgctgcttattggcgtagtacatgccgctggcggcttaagtaacgcagtacagaccttgcaaaccatcgatccgcaactggttacgccacaaggcgctgacgatattctgagccctgcctttatgacgagcttctgggtactggtgtgttttggcgtgattggcctgccgcatactgcggtgcgctgtatctcttataaagacagcaaagccgtacatcgggggatcatcatcggtacgattgtggtcgcaattctgatgttcggtatgcacctggccggagcgttaggtcgggcggtgatccccgatctcaccgtaccggacctggtgatcccaacgttaatggtaaaagtgctgccaccgtttgctgccgggatcttcctggctgcaccgatggctgcgatcatgagcacaattaacgcccaactgctgcaaagttccgctacgatcattaaagatctctatctgaatatccgtccggatcaaatgcaaaacgagacgcgtctgaagcggatgagcgcggtaattacgttagttctcggcgcgttgctgctgcttgccgcctggaagccgccagaaatgatcatctggctgaatttgttggccttcggtgggctggaagccgttttcctgtggccgctggtgctgggtctttactgggaacgcgccaacgccaaaggcgcgctaagtgcgatgatcgttggcggcgtgctgtatgccgtactcgcgacgctgaatattcagtacctgggcttccaccctatcgtgcccagcttactactaagtttgctggctttcctggtcggaaaccgtttcggtacatccgtcccgcaagctaccgttttgactactgataaataaagagttttgccatgccttggatccaactgaaactgaacaccaccggcgcgaacgcggaagatcttagcgatgcgctgatggaagcgggtgccgtttctatcacttttcaggatacccacgatacgccagtatttgaaccgctgccgggcgaaacgcgcctgtggggcgacaccgatgtgattggtctgttcgacgctgaaaccgatatgaacgacgtggtggcgattctggaaaaccatccgctgctcggcgcaggcttcgcgcataaaatcgaacaactagaagataaagactgggagcgcgaatggatggataatttccacccgatgcgctttggtgaacgactgtggatctgccctagctggcgtgatgtgccggacgaaaacgccgtcaacgtgatgttagatccagggctggcgtttggtacgggtacccatccaaccacctctctgtgcctgcaatggctcgacagcctcgatttaaccggtaaaacagtcatcgactttggctgtggttccggcattctggcgatcgcggcgctgaaactgggtgcagcaaaagccattggtattgatatcgatccgcaggcgattcaggccagccgcgataacgccgaacgtaatggcgtttctgaccgtctggaactctacttaccgaaagatcagccagaagaaatgaaagccgacgtggtggtcgctaacatccttgcaggcccattacgtgaactggcaccgttaatcagcgtcctgccggttagtggcggtttgctgggcctttccggtattctggcaagccaggcagagagcgtttgtgaagcttatgccgatagcttcgcactggacccggtcgtggaaaaagaagagtggtgccgtattaccggtcgtaagaattaaccttcgcatcgccgtagggtgacgcggggcgaagtgcgagcaagctcacaaaaggcacgtaaatttgccgattatttacgcaaatttgcgtgccaaaattttcattcataaagaaaaattgagaacttactcaaatttctttgagtgtaaattttagtcactattttctaatatgatgatttttatgagtaattatcgcaccacgctcattttaaatgcaattctttgatccatctcagaggattggtcaaagtttggcctttcatctcgtgcaaaaaatgcgtaatatacgccgccttgcagtcacagtatggtcatttcttaactcatgcgcatcggacaatatcagctcagaaatcgcctgatcgcagcgcccatggctggcattacagacagaccttttcggacgttgtgctacgagatgggagccggattgacagtatccgagatgatgtcttctaacccacaggtttgggaaagcgacaaatctcgtttacggatggtgcacattgatgaacccggtattcgcaccgtgcaaattgctggtagcgatccgaaagaaatggcagatgcagcacgtattaacgtggaaagcggtgcccagattattgatatcaatatgggttgcccggctaaaaaagtgaatcgcaagctcgcaggtagtgccctcttgcagtacccggatgtcgttaaaagcatccttaccgaggtcgtcaatgcagtggacgttcctgttaccctgaagattcgcaccggctgggcaccggaacaccgtaactgcgaagagattgcccaactggctgaagactgtggcattcaggctctgaccattcatggccgtacacgcgcctgtttgttcaatggagaagctgagtacgacagtattcgggcagttaagcagaaagtttccattccggttatcgcgaatggcgacattactgacccgcttaaagccagagctgtgctcgactatacaggggcggatgccctgatgataggccgcgcagctcagggaagaccctggatctttcgggaaatccagcattatctggacactggggagttgctgcccccgctgcctttggcagaggttaagcgcttgctttgcgcgcacgttcgggaactgcatgacttttatggtccggcaaaagggtaccgaattgcacgtaaacacgtttcctggtatctccaggaacacgctccaaatgaccagtttcggcgcacattcaacgccattgaggatgccagcgaacagctggaggcgttggaggcatacttcgaaaattttgcgtaaacagaaataaagagctgacagaactatgttcgaacaacgcgtaaattctgacgtactgaccgtttctaccgttaactctcaggatcaggtaacccaaaaacccctgcgtgacagcgttaaacaggcactgaagaactattttgctcaactgaatggtcaggatgtgaatgacctctatgagctggtactggctgaagtagaacagcccctgttggacatggtgatgcaatacacccgtggtaaccagacccgtgctgcgctgatgatgggcatcaaccgtggtacgctgcgtaaaaaattgaaaaaatacggcatgaactaattcaggttagctaaatgcttgattaaaaaggcgctactcggcatggggaagcgccttttttataggtgtcacaaagggagtgaccatgagaacaggatgtgaaccgacccggtttggtaatgaagctaagaccattattcacggtgatgcgcttgccgaacttaaaaagatccccgccgaaagtgtcgatctgatctttgccgacccaccatataacatcggtaaaaattttgatggtctgatcgaagcctggaaagaagatctgtttatcgactggctgtttgaagtgattgcagagtgccaccgcgttctgaaaaagcagggcagcatgtacatcatgaacagtacggaaaacatgccctttatcgatctccagtgccgcaagctttttaccatcaaaagtcgcatcgtctggagttatgacagttctggagtgcaggcgaaaaaacactacggctccatgtacgaacccatcctgatgatggtgaaagacgcaaagaactacacattcaacggtgatgctattctggtagaagccaaaaccggaagccagcgcgcgttgatcgattatcgcaaaaatcctccacagccttacaatcatcaaaaagtaccgggtaacgtttgggattttccgcgcgtgcgttatttgatggatgaatatgaaaaccacccgacgcaaaaaccggaagccttactgaaacgcattattctcgcctcttccaacccaggcgatatcgttctcgacccgtttgctggtagctttactaccggtgccgtagccatcgccagcggacgaaaattcattggtattgagatcaacagcgagtacatcaaaatggggcttcgacggctggatgtcgcgagccattactctgcggaagaactggcgaaagtgaaaaaaagaaagaccggcaacctgagtaaacgaagccggttaagcgaagttgaccccgatctcattacaaagtaaaggatgtgtaagcctggttttcagattattcatttcgtgtatatttcctgccagacttggttaaacatgcacaggctcaggtaatgattcgcaagtattggtggctcgtcgttttcgctgtcttcgtttttctgtttgatactttactgatgcagtggattgaactgctggcaacagaaacagacaaatgccgcaatatgaacagtgttaatccactaaaactggttaactgtgacgaactgaattttcaggacagaatgtgaatttacatgacacttaattcattcgtttgatgaattaatttcgttatgttttcatctggcatgaacattcttaatacgttatcgaccagagcgggggcttgtttataaagatcataacccgccatattcattaaccagttttgaacaattccgctgaaggcaccatcaataataatcatcacaacatctaaatcgaggttatttgctacacaaccttgttgctgacacgcctgcaatacttcgcggagagtctgcggattaaagcccatcttttcgcgtatcactccctcggccagcatctcatcattaaattcacatttgtgatataagattttcagcaacgcctgctggcggggaattttggcaatatattgcaagccgacaatcaatttttcacgcaattgttgaaacgggtcatgctctaatccagccgtcaagtgttcctggattaactcccgcaaactaggctgttgcaaccacatctcattaaacagttgagtcttgttttcgaagtgccagtagatagcgccacgcgtaacgttagcggcgtcggcaatgtcgttgagcgtcgtcttgcttacgccatgctgcgcaaactgggcgatggcagtttcaatcagttcttgccgggtcttcagagcttcggctttggttctttttgccatgattaattattcaggaaataaatatattcgacacagagtgagaaaatagcgaaggttaatctatcacctaatgtgtatttatacgagaggctaatattgagttgctataaatcgttaaataaataatatatattatttacctaagatacattcactacatcaatatatatttcaatttacgaggttttaattctgcctctttcaacccgcgtcaaaataaaacagtagaatattaatctttttttgtgtttatgtgccttgagatgcctgtattcataactattccttacatcgacgaatgataatttgtaggatagcgaactgtatttttctttctgcgagttaacgcgttgcctttttgggtaaataacgcgcttttggttttttgaggaatagtaatgacgaaacatgccaggtttttcctcctgccctcctttattctgatctccgcggctttaatcgccggttgtaacgataagggagaagagaaagctcacgtcggtgaaccgcaggttaccgttcatattgtaaaaacggccccgttagaagttaagactgaattaccaggccgcaccaatgcttatcgtatagccgaagttcgcccacaggttagcgggatcgtactgaatcgcaatttcactgaaggcagcgatgtgcaagcaggccagtccctgtaccagatcgatcccgcgacctatcaggcaaattatgacagcgcgaaaggcgaactggcgaaaagtgaagccgccgccgccatcgcgcatttgacggtaaaacgttacgttccgctcgtgggtacgaaatacatcagccagcaggagtacgaccaggccattgctgatgctcgtcaggccgatgccgccgtgattgccgcaaaagccacagtcgaaagcgctcgcatcaatcttgcttataccaaagtcactgcgccaattagcggacgtatcggcaaaagcactgtgaccgaaggcgctcttgtcactaatgggcaaacgactgaactggcgactgtccagcagctcgatcctatctacgttgatgtgacccaatccagcaacgattttatgaggctgaagcaatccgtagagcaaggaaatttgcataaggaaaacgccaccagcaacgtagagttggtcatggaaaacggtcaaacctatcccctgaaaggtacgctgcaattctccgatgtgaccgttgatgaaagcaccggctccataaccctacgtgctgtcttccctaacccgcaacatacgcttttgccgggtatgtttgtgcgtgcacggattgatgaaggcgtccaacctgacgccattcttatcccgcaacaaggcgttagccgcacaccgcgtggtgatgcaaccgtgctgattgttaacgataaaagtcaggttgaagcgcgccctgtcgttgccagtcaggcgattggcgataaatggttgattagtgaaggactgaaatctggcgatcaagtcattgtcagcggcctgcaaaaagcgcgtccgggagagcaggttaaagccactaccgatacccccgcagatactgcaagcaagtaaggtaatctgacatggcaaacttttttattcgacgaccgatatttgcatgggtgctggccattattctgatgatggcgggcgcactggcgatcctacaattgcccgtcgctcagtatccaacaattgcaccgcctgcggtttctgttagtgcaaactatccgggcgctgatgcgcagaccgtgcaggatacggtgacgcaggttatcgaacagaatatgaacggtatcgataacctgatgtatatgtcctccaccagcgattccgccggtagcgtgacaattacccttaccttccagtccgggaccgatcctgatatcgcgcaagtgcaggtgcagaacaaactccagctcgccacgccgttgctgccgcaggaggttcagcagcaggggatcagtgttgaaaagtccagtagcagctatttgatggtggcgggctttgtctctgataacccaggcaccacacaggacgatatcagcgactatgtggcctctaacgttaaagatacgcttagccgtctgaatggcgtcggtgacgtacagcttttcggcgcacagtatgcgatgcgtatctggctggatgccgatctgctaaacaaatataaactgacaccggttgatgtgattaaccagttgaaggtacagaacgatcagatcgctgccggacagttgggcggaacgccagcgttaccagggcaacaattgaacgccagcattattgctcagacgcggtttaaaaatccggaagaattcggcaaagtgaccctgcgcgtaaacagtgacggcagcgtggtacgcctgaaagatgtcgcacgggttgaacttggcggtgaaaactataacgttatcgctcgtatcaacggaaaaccggcggcgggcctggggattaagctggcaaccggcgcgaatgctctcgataccgcgaaagccattaaggcaaaactggcggaattacagccattcttcccgcagggaatgaaggttctctacccttatgacaccacgccattcgtccagctttctattcacgaagtggtaaaaacgctgttcgaagccattatgctggtgttcctggtgatgtatctgttcttgcagaatatgcgagcaacgctgatccccgccattgcggtacccgtggtgttgttagggacgtttgccatcctcgccgcttttggttactccatcaacacactaacgatgttcgggatggtgcttgccatcgggctgctcgtcgatgatgcgatagtggtggtggagaacgtcgagcgcgtgatgatggaggataagctcccgccaaaagaagcgacggaaaaaagcatgagccaaattcagggcgcactggtgggtatcgcgatggtgctgagtgcggtatttattccgatggcattcttcggcggttctactggggcaatttatcgccagttctctatcaccatcgttagcgcaatggcgctttctgttctggtggcattgattcttacccctgcgttatgtgcaacgctgcttaaacccgtctctgctgagcatcacgaaaataagggcggtttcttcggttggtttaataccaccttcgatcatagcgttaaccactacaccaacagcgtcggcaaaatcctcggatccacaggacgatatttactgatctatgcgctgattgttgcaggaatggtggtgttgtttttacgtcttccgtcttccttcttacctgaagaggatcagggtgtctttctgaccatgattcagttacccgctggcgcgacgcaagagcggacgcaaaaagtgttggatcaagttacggattactatctgaagaacgagaaagcgaacgttgaaagtgtctttacggttaacggctttagcttcagcggccaggcacaaaacgccggtatggccttcgtcagtctgaaaccgtgggaagagcgtaatggtgacgaaaacagtgcggaagcggtaatccatcgtgccaaaatggaattgggcaagatccgcgacggttttgtcattccattcaatatgccagccattgttgaactgggcacggcaacgggtttcgactttgagttaattgatcaggctgggctgggtcacgatgccctaacccaggcccgtaaccagttgcttggtatggcggcgcaacatcctgccagcttagtcagcgtgcgccctaatggcctggaagacaccgcgcagtttaaactggaagttgaccaggaaaaggcgcaggcattaggtgttagtctttctgacatcaatcagaccattagtacggcgctgggtgggacttacgttaacgacttcatcgaccgtggccgcgtgaaaaagttgtatgttcaggcggatgccaaattccgtatgctgccagaagatgtcgataaactttatgtccgcagcgccaacggcgaaatggtgccattcagcgcctttaccactagtcattgggtgtatggctctccgcgactggaacgctacaacggtctgccgagtatggagattcagggggaagccgcgccaggaaccagttccggcgatgccatggcgttgatggaaaaccttgcgagtaaattacctgcgggcattggttatgactggacgggtatgagctatcaggaacgcttaagcggaaaccaggctcccgctctggtagcaatttcctttgtggttgttttcctgtgccttgctgcactctatgaaagctggagtattcctgtcagcgttatgttggtagtgccgttagggattgtcggcgtgctgctggcggcgacactctttaatcaaaaaaatgacgtctactttatggtgggcttgctaacgacaattggcttgagcgccaaaaacgctattttgatcgttgagttcgctaaagatctcatggagaaagagggtaaaggtgttgttgaagcgacactgatggcagtacgtatgcgtctgcgtcctatcctgatgacctctctcgcctttattctcggcgtattaccgctagctatcagtaacggtgccggcagtggcgcgcagaacgctgtgggtatcggggtaatgggaggaatggtctctgcaacgttgctggcaatcttcttcgtaccggtgttctttgtggtgatccgccgttgctttaaaggataaatcagaaacataaaggcgctttcgggtgcctttattatttccagtgaaacccataaaaattaataagatattcttctgctcactctttaaaagctttctatagttcccgctcccttcactatttttacaattcacataatttgtcattattcattccgcaagatttataacctccggtgataaaatggcattcagctcgttaataagagagttaacttattaagcgttagcgtttattactgaggtaacaccatgaaaagattaattcctgtggcattgctcaccgcattgctggcgggctgtgctcacgatagcccctgcgttccggtttatgacgatcagggtcgtctggttcacaccaatacctgtatgaaaggcacgactcaggataactgggaaacggctggggctattgccggcggggcagctgctgttgctggcctgacgatggggatcatcgctctaagcaaataactgaacagggcgcggagttccgcgctctttttaacgatacagtatctctccataagataaaatattgctatattctgctgggtaattccctgctgatttagcatgttacatcgcgttatttcgctgctttcgaaataacgcatcaatttaattttcacacttcccaccagaaatatactcacgctaacaatcattattctgcttagtaaaacacgcgtaaatattttgcgccaaaatgtggcgcatgtttcattttcgcaccattgcggggcgctgtttttattatttcctgtctacactcagcttattgcgacgcgaaatcgtgcgcaaaagctggcactacttttgcttataagaggatggccacagacaggtaaaagacgtttcccaaacgtcctataacgataattttcgcctcacaggaagcattatgaaaaagatgatgatagccacactggctgccgccagcgtgctgcttgccgttgcaaatcaggcgctgctggcgcgacgcttgatgccgttcagaaaaaaggttttgtgcaatgcgggatcagtgatggattacctgggttctcttatgccgatgctgacggtaagtttagtggtattgatgttgatatttgtcgtggtgttgccgctgctgtatttggtgacgacacgaaagtgaaatataccccgctcactgcaaaagaacgcttcaccgctttacagagtggggaggtggatttgctctcccgtaatacgacctggactagttctcgcgatgccgggatgggaatggcatttaccggcgtcacttattacgacggcattggcttcctgacgcacgataaagcggggctaaaaagcgcgaaagaactggatggcgctaccgtctgtattcaggcgggtactgataccgaactcaacgtcgccgactacttcaaggcaaacaatatgaagtacacaccggtgactttcgatcgctctgacgaaagtgcgaaggcactggaatctggtcgctgcgatacgctggccagcgatcaaagtcaactgtatgccctgcgcatcaaattaagcaacccagctgaatggattgtcttaccggaagttatcagtaaagaaccgcttggtccggtagttcgtcgtggcgatgatgaatggttcagcattgtacgctggacgcttttcgccatgctgaatgctgaagagatgggcatcaattcccagaacgtcgatgaaaaagcggctaatccagcaacgcctgatatggcacatctgctgggtaaagaaggcgattacggcaaggatctgaagctggataataaatgggcctataacatcatcaaacaggtgggtaactacagcgaaatttttgagcgtaacgtaggtagtgaaagcccgctgaaaattaaacgtgggcaaaataatctctggaataacggcggtattcagtacgcaccgcccgtgcgttaagtcggtgtgaggtaacgagcgtcgctacggcggcgctctcttcagcgttatgctttccgaggtttctatgtctcatcgccgcagtaccgttaaaggcagtctctcttttgccaaccctacggttcgcgcctggttattccagatccttgccgttgttgctgttgtcggcattgttggttggttatttcacaacactgtaacgaatctcaataatcgtggcattactagtggttttgcctttctggatcgcggcgctggcttcggtattgtccagcatttgatcgattaccagcagggcgacacctacggacgcgtttttattgtcggcttactcaatacgctactggtttctgcattgtgtattgtgttcgcttctgttttgggcttctttatcggtctggcgagacttagcgataactggctgctacgaaagctttccacaatttatattgagatcttccgtaatattcccccgctgctgcaaatcttcttctggtactttgccgtgttgcgcaatttgcccggaccacgccaggctgtgagcgcgtttgatctggcctttttgagcaatcgtgggctttatattccgagtccgcagctgggagacggatttattgcgtttatcctggctgttgttatggctatagtcctttctgttgggctattccgctttaataaaacataccagataaagaccggacaactgcgccgcacctggccgatcgccgcagtgttgatcattggtttgcctttactggcgcaatggctttttggcgcagcactacactgggatgtcccagccctacgaggctttaacttccgcggcgggatggttttaattcctgaactggcagccttaacgctggcacttagcgtttatacatctgcatttatcgccgagattatccgcgctgggatccaggcagtgccttatggtcaacatgaagcggctcggagtctgggattacccaacccggttacgctacgccaggtcattattccccaggcattgcgggtgattattccaccgttaaccagccagtatctcaacatcgtcaaaaactcctctcttgccgccgctattggctatcccgatatggttagcctgtttgccggcaccgtgctgaatcagacggggcaagccatcgagacgatagccatgaccatgagcgtctatctgattatcagcctgactatcagcctgctgatgaatatctataaccgccgcatcgcgatcgttgaacgctaaggagtcatgatgacaaaagtattgctgtctcatcccccgcgcccggcgagccataacagtagccgcgcgatggtgtgggtgcgaaaaaatctgttctccagctggagcaatagcctgctgactattggctgcatatggttgatgtgggaactgatcccaccgttgctgaactgggcatttttgcaggctaactgggttggcagtacgcgtgccgactgcacaaaagccggtgcctgttgggtcttcatccacgaacgatttggtcagtttatgtatgggctttacccacacgaccaacgctggcgaattaacctcgcattactgattgggcttgtgagcatcgcaccaatgttctggaaaatactcccgcatcgcggtcgctatattgcggcctgggcggtgatttacccactgattgtctggtggctgatgtatggcggtttttttgctcttgagcgggttgaaacccggcaatggggcgggctgacgctaactttaattattgcaagtgttgggattgcgggggcgctaccgtgggggatcttactggcgttaggtcgccgctcccatatgccgattgtgcgtatcttaagcgtcatttttatcgaattctggcgcggcgtgccgctgattaccgttctgtttatgtctagcgtcatgctgccgttgtttatggcagaaggcaccagtatcgacaaattgatccgcgcgctggttggcgtgatcctgtttcagagtgcatatgttgcggaagtcgtgcgaggtggattacaggcgctgcctaaagggcaatatgaagcggcagagagcctggcgttgggttactggaaaactcaggggctggttattctgccacaggcgttgaagctggtaattcctgggctggtaaataccatcatcgcactcttcaaagataccagcctggtgatcattatcgggttgttcgatcttttcagtagcgttcagcaggcaaccgttgatcccgcctggttgggtatgagcacggaagggtatgttttcgccgcgctgatctactggatcttctgtttcagcatgagccgctatagccagtatctggaaaaacgttttaacaccgggcgtacaccgcattgaggacactatgagccaaattttactgcaacctgctaacgcgatgattacgctggaaaacgtcaataaatggtatggacaattccatgttttgaaaaatataaatttaaccgtgcaaccgggagaacggatcgttctgtgtggccctagtggttccggtaaaagcacaaccattcgttgtattaatcatctggaagaacatcaacagggacggatcgtggtagatggcatcgaacttaatgaagatatccgcaatattgagcgcgtcaggcaggaagtgggaatggtctttcagcatttcaatctcttccctcatctgaccgttttacagaactgtaccctggcaccgatttgggtacgcaagatgcctaagaaagaggctgaagatctggcggtgcattacctagagcgggtgagaattgccgaacatgcgcataagtttcccggacagattagtggtggtcagcagcaacgcgttgccattgcgcgtagcctgtgtatgaagccgaaaattatgttgtttgatgagccaacgagcgcgctcgatcctgagatggtgaaagaggtgctggatacgatgattgggctggcgcagagcggtatgacaatgttgtgtgtaacacatgagatggggtttgcacgaaccgtcgctgaccgggtaatttttatggatcgtggggaaatagtggagcaagctgcacctgatgaattttttgcgcatcctaaaagtgagcgtacgagggcatttttaagccaggtaatccattaattgaatgttagttcgaaaagcaaaaaggccatcctttcggatggcctttcgcttgatttgatgtctggcagtttatggcgggcgtcctgcccgccaccctccgggccgttgcttcgcaacgttcaaatccgctcccggcggatttgtcctactcgggagagtgttcaccgacaaacaacagataaaacaaaaggcccagtcttccgactgagccttttgttttatttgatgtctggcagttccctactctcgcatggggagaccccacactaccatcggcgctacggcgtttcacttctgagttcggcatggggtcaggtgggaccaccgcgctactgccgccagacaaattcttttctaatctgccgaactttaacctaaaaagtggtgctgatacccagagtcgaactggggacctcacccttaccaagggtgcgctctaccaactgagccatatcagcacgctaaatttgatgcctggcagttccctactctcgcatggggagaccccacactaccatcggcgctacggcgtttcacttctgagttcggcatggggtcaggtgggaccaccgcgctacggccgccaggcaaattctgttttatcagaccgcttctgcgttctgatttaatctgtatcaggctgaaaatcttctctcatccgccaaaacagcttcggcgttgtaaggttaagcctcacggttcattagtaccggttagctcaacgcatcgctgcgcttacacacccggcctatcaacgtcgtcgtcttcaacgttccttcaggacccttaaagggtcagggagaactcatctcggggcaagtttcgtgcttagatgctttcagcacttatctcttccgcatttagctaccgggcagtgccattggcatgacaacccgaacaccagtgatgcgtccactccggtcctctcgtactaggagcagcccccctcagttctccagcgcccacggcagatagggaccgaactgtctcacgacgttctaaacccagctcgcgtaccactttaaatggcgaacagccatacccttgggacctacttcagccccaggatgtgatgagccgacatcgaggtgccaaacaccgccgtcgatatgaactcttgggcggtatcagcctgttatccccggagtaccttttatccgttgagcgatggcccttccattcagaaccaccggatcactatgacctgctttcgcacctgctcgcgccgtcacgctcgcagtcaagctggcttatgccattgcactaacctcctgatgtccgaccaggattagccaaccttcgtgctcctccgttactctttaggaggagaccgccccagtcaaactacccaccagacactgtccgcaacccggattacgggtcaacgttagaacatcaaacattaaagggtggtatttcaaggtcggctccatgcagactggcgtccacacttcaaagcctcccacctatcctacacatcaaggctcaatgttcagtgtcaagctatagtaaaggttcacggggtctttccgtcttgccgcgggtacactgcatcttcacagcgagttcaatttcactgagtctcgggtggagacagcctggccatcattacgccattcgtgcaggtcggaacttacccgacaaggaatttcgctaccttaggaccgttatagttacggccgccgtttaccggggcttcgatcaagagcttcgcttgcgctaaccccatcaattaaccttccggcaccgggcaggcgtcacaccgtatacgtccactttcgtgtttgcacagtgctgtgtttttaataaacagttgcagccagctggtatcttcgactgatttcagctccacgagcaagtcgcttcacctacatatcagcgtgccttctcccgaagttacggcaccattttgcctagttccttcacccgagttctctcaagcgccttggtattctctacctgaccacctgtgtcggtttggggtacgatttgatgttacctgatgcttagaggcttttcctggaagcagggcatttgttgcttcagcaccgtagtgcctcgtcatcacgcctcagccttgattttccggatttgcctggaaaaccagcctacacgcttaaaccgggacaaccgtcgcccggccaacatagccttctccgtccccccttcgcagtaacaccaagtacaggaatattaacctgtttcccatcgactacgcctttcggcctcgccttaggggtcgactcaccctgccccgattaacgttggacaggaacccttggtcttccggcgagcgggcttttcacccgctttatcgttacttatgtcagcattcgcacttctgatacctccagcatgcctcacagcacaccttcgcaggcttacagaacgctcccctacccaacaacgcataagcgtcgctgccgcagcttcggtgcatggtttagccccgttacatcttccgcgcaggccgactcgaccagtgagctattacgctttctttaaatgatggctgcttctaagccaacatcctggctgtctgggccttcccacatcgtttcccacttaaccatgactttgggaccttagctggcggtctgggttgtttccctcttcacgacggacgttagcacccgccgtgtgtctcccgtgataacattctccggtattcgcagtttgcatcgggttggtaagtcgggatgacccccttgccgaaacagtgctctacccccggagatgaattcacgaggcgctacctaaatagctttcggggagaaccagctatctcccggtttgattggcctttcacccccagccacaagtcatccgctaatttttcaacattagtcggttcggtcctccagttagtgttacccaaccttcaacctgcccatggctagatcaccgggtttcgggtctataccctgcaacttaacgcccagttaagactcggtttcccttcggctcccctattcggttaaccttgctacagaatataagtcgctgacccattatacaaaaggtacgcagtcacacgcctaagcgtgctcccactgcttgtacgtacacggtttcaggttctttttcactcccctcgccggggttcttttcgcctttccctcacggtactggttcactatcggtcagtcaggagtatttagccttggaggatggtccccccatattcagacaggataccacgtgtcccgccctactcatcgagctcacagcatgtgcatttttgtgtacggggctgtcaccctgtatcgcgcgcctttccagacgcttccactaacacacacactgattcaggctctgggctgctccccgttcgctcgccgctactgggggaatctcggttgatttcttttcctcggggtacttagatgtttcagttcccccggttcgcctcattaacctatggattcagttaatgatagtgtgtcgaaacacactgggtttccccattcggaaatcgccggttataacggttcatatcaccttaccgacgcttatcgcagattagcacgtccttcatcgcctctgactgccagggcatccaccgtgtacgcttagtcgcttaacctcacaacccgaagatgtttcacttcagagttgcgaaaatttgagagactcacgaacaactttcgttgttcagtgtttcaattttcagcttgatccagatttttaaagagcaaaacttcgcagtgaacctttgcaggtacactctgaagtattttttatttaatcactacagagatggtggagctatgcgggatcgaaccgcagacctcctgcgtgcaaagcaggcgctctcccagctgagctatagccccataacatgtagttaaaacctcttcaaatttgccgtgcaaatttggtaggcctgagtggacttgaaccaccgacctcacccttatcaggggtgcgctctaaccacctgagctacaagcctgtagaggttttactgctcattttcatcagacaatctgtgtgagcactgcaaagtacgcttctttaaggtaaggaggtgatccaaccgcaggttcccctacggttaccttgttacgacttcaccccagtcatgaatcacaaagtggtaagcgccctcccgaaggttaagctacctacttcttttgcaacccactcccatggtgtgacgggcggtgtgtacaaggcccgggaacgtattcaccgtggcattctgatccacgattactagcgattccgacttcatggagtcgagttgcagactccaatccggactacgacgcactttatgaggtccgcttgctctcgcgaggtcgcttctctttgtatgcgccattgtagcacgtgtgtagccctggtcgtaagggccatgatgacttgacgtcatccccaccttcctccagtttatcactggcagtctcctttgagttcccggccggaccgctggcaacaaaggataagggttgcgctcgttgcgggacttaacccaacatttcacaacacgagctgacgacagccatgcagcacctgtctcacggttcccgaaggcacattctcatctctgaaaacttccgtggatgtcaagaccaggtaaggttcttcgcgttgcatcgaattaaaccacatgctccaccgcttgtgcgggcccccgtcaattcatttgagttttaaccttgcggccgtactccccaggcggtcgacttaacgcgttagctccggaagccacgcctcaagggcacaacctccaagtcgacatcgtttacggcgtggactaccagggtatctaatcctgtttgctccccacgctttcgcacctgagcgtcagtcttcgtccagggggccgccttcgccaccggtattcctccagatctctacgcatttcaccgctacacctggaattctacccccctctacgagactcaagcttgccagtatcagatgcagttcccaggttgagcccggggatttcacatctgacttaacaaaccgcctgcgtgcgctttacgcccagtaattccgattaacgcttgcaccctccgtattaccgcggctgctggcacggagttagccggtgcttcttctgcgggtaacgtcaatgagcaaaggtattaactttactcccttcctccccgctgaaagtactttacaacccgaaggccttcttcatacacgcggcatggctgcatcaggcttgcgcccattgtgcaatattccccactgctgcctcccgtaggagtctggaccgtgtctcagttccagtgtggctggtcatcctctcagaccagctagggatcgtcgccttggtgagccgttaccccaccaacaagctaatcccatctgggcacatccgatggcaagaggcccgagggtccccctctttggtcttgcgacgttatgcggtattagctaccgtttccagtagttatccccctccatcaggcagtttcccagacattactcacccgtccgccactcgtcagcgaaacagcaagctgtttcctgttaccgttcgacttgcatgtgttaggcctgccgccagcgttcaatctgagccatgatcaaactcttcaatttaaaagtttgatgctcaaagaattaaacttcgtaatgaattacgtgttcactcttgagacttggtattcatttttcgtcttgcgacgttaagaatccgtatcttcgagtgcccacacagattgtctgataaattgttaaagagcagttgcgacgcggctttcagctcactgtcgcgaggtggcgtatattacgctttcctctttcagagtcaaccctgaatttcaggatttttttctcttcgttgttccgaccatcctgtgaagtgtttcacgttgtcgtctcaacggaggcgcattatagggatcccaattttttgcacaagtatttttttgatctttttttctgtttgttgttttttcaccctttttgctgcaatcgcacacaaaacggtgcttttttgcatactaaaagacttgcacaaggccaataatgcccccaaagtcattagtaaatcatttattgctgaggtaagtatgtctgatgttttacgcccataccgcgatctttttccacaaatcggtcagcgcgtaatgatcgacgatagcagtgtcgtgattggtgacgttcgtctggctgatgatgtggggatctggccgctcgttgtgattcgtggagatgtacattatgtacagatcggagcacgcaccaatatccaggatggcagtatgttgcatgtcactcataaatccagctacaacccagatggcaacccattaaccattggcgaagatgtcactgttggtcacaaggtgatgctccacggctgcaccattggcaatcgagttttggttgggatgggcagtattttacttgatggcgcaatagtagaagatgatgtgatgattggtgcgggtagtctggtcccacaaaataaacggctggagagcggatatctgtatctcggtagccccgtcaaacagatccgcccgttaagtgatgaagagaaggctgggttacgctattccgcgaataattacgtgaaatggaaggacgaatatctggatcagggtaaccagacccagccttgatcatcttcactttgttcctgaattaagttttccgcttcttcttccaggtcccagcgatgctgacgaaaactcgctaaccactgttctggcgtatctccagtaaagcgatacgccagactctcgccagagatcgcgcatgtcagttgcataccattcacgagagcgggaaaacatacacattttttattctcgtcccactcttccctgtccggaaactggatggcctgattcacgcggacaattcctcctgcaattgctttataactggttctacgtcaggcagaacaccgtgccagagaagaaaggcatgagccgcctgtgccaccagcattcctaaaccatcagcattacgcttactgcctcgctgctcacaccatgccagaaaaggagtttttcctttctgatagaacatgtcatagcaataaatgcctggatgaatgaggctactcgggatcgccggaatatcaccactgatgccactggatgttgcattaataatgagatcaaactcatgaccttccagttcgtccatactcaacgcctgaatactgccagtgtgcgcaaacaatttagccaactcttccgcgcgggataccgtccgattagttattgtcaccgcacagtccagggaaaggagtggcagtagtacgccgcgagatgctccaccagcgccgataagcagaatacgtaaaccagggcggataaaagacagacgttccagatcgcttaacaagcctacaccatcggtattgtcacccagcaggcgtccatcttctaaccgcatgagggtattaacagcaccagccaacgctgcccgttcagtaagctcatccgctctggcaaaagcctcttctttaaaaggcaccgtcacattcgcacctttaccaccagcactaaagaaagcgttcagtgtgttgatgaaatcattgatgggtgccaacacgcgcccatagggatgttcaatattcagttgctgagcaaattgctgatgaatgaatgggcttttgctgtgggctatcggattaccaaaaacagcataggtttccattatgttacccctgtcgaaacagttcacccgtcagggcatcgcggatttcactaggatttaaacgcccccccgtttcaccaggcacaaccgggaacgccgcgccaaattgtgcgcgaacttcgtctactgttcgacaaggtggcaatccactcaagttggcactggtagaaaccagcggtttaccataagcctggcacaaagcaaccaccaacggatggtcggtgactcgtacagcaaggctatcaaagcggcccgtcaaccagcgcggtgttgtcgcaggcgcgggaaagacaaaggtgacaggacctggccagcgggaaaaaatggtttcacgctgcacgtcagtcaacatggtgtcatcaatatagggtttaagctgctcgtaatttgctgcgattaaaatcagccccttatcaaccggacgctgttttaactccaacagtcgcatcactgctgtttcgctatcaggatcgcacccaacaccgaaaacggcttccgttggataggcgatgacacgttcttcattgagaacatctatcgcagctgcgatagcgtctctttgcaggttattattcacgttattattccgcgctaaccggctttccacattgtttactggcacaaaagtgttttacaccctgcgcggttttcttttcgatgagtagcggataatgacactcagggcattctccagctatgggtttgaagttaatggcaaattgacactccgggtagcgatcacaagagtgaaatgttttgccataacgggagcggcgctggaccagatggcccgtccgacattgggggcatgtaattgctgtttcgtccggtttatcgataagttcggtatgttcgcattcagggtagttaatgcaaccaataaacataccaaagcgtccctggcgtaataccagatttgcgccacatgcagggcaaacctgcccctccagaactttgacgatatgtccatccgcactagatttcagaggacggacgtagtcacacgccggatactgactgcatccaagaaacggaccgtgtttcccggatcgaataaccagttcagccccgcactttgggcaggactcattattacgcaccgtgaacagtgcacttttcgccataacaacttatgctgaattaaagaaatgattaatgcagcataccttcattcacttcaaagagtaattcttccatttgctggtacgcattttcgcagcccggaatattgaacaacaccatcaggatcacccatttcagatcatccagttcgaactctgcgttatccagcgcgagcactcgctctatcaccatttcacgagtttcaaggttgagcacctgaatctgctcaaggaaaagcagaaacccacggcagctggcatccagtcgttcacactcttccggtgtataaatacgcatggagagaggatcgctggccagttgcatcggttctgccaacccttcctgataatcagcaagtttttccagccatagcagggcattgtagatatcttctcgctcaaaacctgcgtcggtaagatcctgttcaagtttgtcttgatccacacgcaactcagcttctgtgtgaatataggtttcaaacaaatacattagtacgtcgaacatggcatgccctcctcaatcggacatagccgccgggtacagctgcgatccatcctgctaactccagttcgagtagttgagtaactacctctggcacaggttggccggcacgttcagcgacgacgtcaacaggtgttacctcatctcctacgttagccaggagctcaggaaatggcaatgccacgtcttgctgatctggactataaaaactattttcaggggcgtctggcaaccagtgcaatccaaattgcaagttttccagaatttcttccggttccgtcacaagaatcgcaccttgttttattaaccagtgaggcccttcgcttcccggattccctattggacctggcaaggcaaaaacttctcgcccctgctcaagcgcacaacgtgctgtcaccaggctaccactacgcaaagccgcttccaccaccagtacacctttacttagaccactgataatgcgatttcttcgtgggaaattgtaagcaaggggtggaacatcgaggggaaattcgctgacgagagcgcccccctgttcaagcagactggcagccagtcgggcatgacggcggggatgaatggtattaagtccattccccaatacagcaatgctgacgccatttacctgtaaggctgctttatgcgctacaccatcgattccacgcgccagtccactcgtaattgtcactccacgcgtcgccagagtttcgcaaaataatcgtccccatcgctcgccataccaactatgcgcccgactccccactacggcaagctgaaaactatgcagcgcgtgcagttctccttcaacaaacagtgcgccggggtaatctgtcgtcgccagaagttgaggaggataaaattcgctgtccgcaggaattaaatgatggttgggttgctccaaccaacaaagactgctttcgatactctttcgtggaaaactaagaaagcgttgtgcctgccgcaatgtaagccctgtttgctgcaatacaaccgcatcaatatggctctgttttgccacccagtgagcgatacggaccatatcatcgccgtacaagctgctgatactcattaaacgcagccaaatttctgtatcgaccatccttatctccctgccataagcagccttagcaatctttgcgattggtcagtgatgctgtcaatcagagggggatttgtctagaatagaagaaataatctttctaactcctgaacacatctctggagatttatgagtgttttgcaagtgttacatattccggacgagcggcttcgcaaagttgctaaaccggtagaagaagtgaatgcagaaattcagcgtatcgtcgatgatatgttcgagacgatgtacgcagaagaaggtattggcctggcggcaacccaggttgatatccatcaacgtatcattgttattgatgttagcgaaaaccgtgacgaacggctagtgttaatcaatccagagcttttagaaaaaagcggcgaaacaggcattgaagaaggttgcctgagcatccctgaacaacgtgctttagtgccgcgcgcagagaaagttaaaattcgcgcccttgaccgcgacggtaaaccatttgaactggaagcagacggtctgttagccatctgtattcagcatgagatggatcacctggtcggcaaactgtttatggattatctgagtccgctgaaacaacaacgtattcgtcagaaagttgaaaaactggatcgtctgaaagcccgggcttaaggataagaactaacgtgagtgaaagtctacgtattatttttgcgggtacacctgactttgcagcgcgtcatctcgacgcgctgttgtcttctggtcataacgtcgttggcgtgttcacccagccagaccgaccggcaggacgcggtaaaaaactgatgcccagcccggttaaagttctggctgaggaaaaaggtctgcccgtttttcaacctgtttccctgcgtccacaagaaaaccagcaactggtcgccgaactgcaggctgatgttatggtcgtcgtcgcctatggtttaattctgccgaaagcagtgctggagatgccgcgtcttggctgtatcaacgttcatggtagtctgctgccacgctggcgcggtgctgcaccaatccaacgcagtctatgggcgggtgatgcagaaactggtgtgaccattatgcaaatggatgtcggtttagacaccggtgatatgctctataagctctcctgcccgattactgcagaagataccagtggtacgctgtacgacaagctggcagagcttggcccacaagggcttatcaccacgttgaaacaactggcagacggcacggcgaaaccagaagttcaggacgaaactcttgtcacttacgccgagaagttgagtaaagaagaagcgcgtattgactggagtcttagcgcagcacagcttgaacgctgcattcgcgctttcaatccatggccaatgagctggctggaaattgaaggacagccggttaaagtctggaaagcaagcgtcattgatacggcaaccaacgctgcaccaggaacgatccttgaagccaacaaacaaggcattcaggttgcgactggtgatggcatcctgaacctgctcagcttacaacctgcgggtaagaaagcgatgagcgcgcaagacctcctgaactctcgtcgggaatggtttgttccgggcaaccgtctggtctgatagtccactcttctaagcccggtcttgccgggcgtttttatacttatgaaaaaacaacgtaatttacgtagcatggcggcccaggccgttgaacaagtcgtcgagcaagggcaaagtttaagcaacattctgccaccgctccagcaaaaagtttccgataaagacaaagcacttcttcaagagttgtgctttggcgtactgcgtacgcttagccagttagactggctgattaataagttaatggcccgtccgatgaccggcaaacagcggaccgtgcattacctgattatggttggtttgtatcaactgctttatacccgcattccacctcatgctgcgctggctgaaacggttgaaggcgctatcgcaattaagcgtccgcaacttaaagggttgataaacggtgtattacgccagttccagcgtcagcaagaagagttattagccgagtttaatgccagtgatgcacgttatctgcatccttcctggttgctgaagcgtctgcaaaaagcgtatccagagcagtggcaatccatcgtcgaagccaataaccagcgtccgccaatgtggctgcgtattaatcgtacgcatcattcccgcgacagctggcttgcattgctggatgaagcaggaatgaaaggtttcccgcatgcggattaccctgatgctgtacgtctggaaacacctgcacctgttcatgcgctacctggttttgaagacggatgggttaccgttcaggatgcaagtgcacaaggttgcatgacctggcttgcgccacaaaacggtgaacacattttggatctttgtgccgcccccggcggtaaaacaacgcatatccttgaggtggcaccagaagcgcaggttgttgcggttgatatcgacgaacagcgcctctctcgggtttacgacaatttaaaacgccttggtatgaaggcgaccgtgaaacaaggtgatggccgttacccttctcaatggtgtggcgagcaacagtttgatcgcattttattagatgcgccttgtagtgcaaccggtgtgattcgtcgccatccagatattaaatggttacgtcgcgatcgcgatatcccggaactcgcgcaattgcagtctgaaattctcgacgccatttggccgcatttaaaaaccggtggaactctggtctatgccacctgtagcgtgttaccggaagagaatagcctgcagattaaagcctttttgcaacgtaccgctgatgccgaactttgcgaaacaggaacaccagagcaaccgggtaaacaaaatctacctggtgccgaagagggcgacggcttcttttacgctaagctaatcaaaaagtgatgagataacgggtcgcgactgatgaaaattatcattctgggtgccggccaggttggcggcacactggcggaaaacctggttggcgagaacaacgatattactgttgtcgataccaacggtgagcgtctgcggaccttacaggataaatttgacctgcgggtcgtgcaggggcatggctctcatccacgcgtattgcgggaggcaggtgccgacgacgccgatatgctggttgctgtaaccagtagtgatgaaaccaatatggttgcctgccaggtagcctacagtcttttcaacacccctaatcgcatcgctcgtatccgcagtccagactacgtgcgcgatgccgataagctatttcatagtgatgctgtgccgattgatcatctgatcgcaccagagcagttggttatcgataatatttaccgactgattgagtatcccggcgcattgcaggtggtgaacttcgctgagggtaaagtcagcctggctgtggttaaagcctattatggcggcccgctgattggtaatgcacttagcaccatgcgcgaacatatgccacatatcgatactcgtgtggcagcaattttccgccacgatcgccccattcgtccgcaaggtagcaccattgttgaagctggtgatgaagtgttctttattgccgctagtcagcatatccgcgcggtgatgagtgaattacagcgactggaaaaaccgtataagcggatcatgctggttggtggcggtaatatcggtgcagggctggcgcgtcgtctggaaaaagattacagcgttaaactcatcgaacgtaatcagcagcgcgctgccgaactggcggaaaagttacagaatacgatcgtcttttttggtgatgcgagcgatcaagaactactggccgaagaacatatcgatcaagttgatctgtttattgccgtcaccaacgatgacgaggccaatatcatgtccgccatgcttgccaaacgtatgggtgcgaaaaaggtgatggtattgatccagcgtcgcgcttatgtggatctggttcaggggagcgttatcgatattgcgattagtccacaacaagcaactatttctgcgttgcttagccatgtgcgaaaagcagatattgttggtgtttccagtttgcgccgcggcgtagcagaagctattgaagccgttgctcacggtgatgaaagcaccagtcgcgttgtcggcagagtcattgacgaaatcaagctaccgccaggaacgattattggagcggtggtacgtggaaacgacgtgatgattgccaatgacaatctgcgcattgagcaaggcgatcacgtaattatgttcctcacagataaaaagtttattaccgacgtcgaaagactcttccagccaagccctttcttcttgtaattaataaggcgtctaatgacgccttattatttccctttgattatcaaggattaattaaattcattcctggcaggaaaatggcttaacatttgttagacttatggttgtcggcttcatagggagaataacatgagcattattaaagaatttcgcgaatttgcgatgcgcgggaacgtggtggatttggcggtgggtgtcattatcggtgcggcattcgggaagattgtctctagtctggttgccgatatcatcatgcctcctctgggcttattaattggcgggatcgattttaaacagtttgctgtcacgctacgcgatgcgcagggggatatccctgctgttgtgatgcattacggtgtcttcattcaaaacgtctttgattttctgattgtggcctttgccatctttatggcgattaagctaatcaacaaactgaatcggaaaaaagaagaaccagcagccgcacctgcaccaactaaagaagaagtattactgacagaaattcgtgatttgctgaaagagcagaataaccgctcttaacaagcgccactaagcagaagaccagtggtaaaaaagtgatttactttcttgccactggcctcccagttcccccgattgccatgttttccttttcgcatgtaactgcctttccccttcttatttttctctacgcgctgtcggaataagggatcatgtagtaatgcttctatcgcattatcctttatctgccctttagtatgctgatatcgactcataaaaactccagttggttatttaacggcgcgagtgtaatcctgccagtgcaaaaaatcaacaaccactcttaacgccactcgccccttgttcaagagcttcaagaatgctacaataaacactgctatgagcagtcccacaacaggcatcgttaaggcgttgcaaggaacgctgcatactctgcaactcggctatccgtgcttcgacttcctgcaatctttcctgcacaatgcctttactctcctgacaggtatggtgttcaggatcgatgcggatgctcagcaactcgcggatgctctccagactgaaacctagttgtctggcatggcggataaatttcaatcgctggagatcgctttcggtatataggcgaaacccaccttcagtacgcacttcatgctccatcatctgctgtttttcgtaataacgaatcgtgtcgggtgttacttccgccatttttgccagctcaccaatgcgatacatacatactccattagttatcgttgattttgtccaacaacttgtcagcataatcgccgcgtaaaaaatcggtactcaatccagcttgtcgcagcttcaattccagtaaactcaatcgacggctaacctcttgatattgcggatcatcgtgacggatacctttgagaatatccagaagctgaattgcttctctccgttgctcaagttctggcggtaagcaaccggcattcttcagcaagcgataccccgcacgtaattccggtggcacgtgagaatcatcatccagtatcaatggttcgccgctacctgccaggttatcaaactcacctttcgcttgcgcttctgctatatggcgctctgcccactggtcaagtaaccacataaatactccaggggatgaacaaaaagagtacagctattgtagataagtggggatactacgggtataaaaaaacccgccggggcgggtttttttacgttgcttcagattactctgcagcagcttctgctttctcactacgatcaaccagctcgatgtaagccatcggcgcgttgtcgcctgcacggaagccacacttcagaatacgagtgtaaccaccggcacggctcgcgaaacgcgggcccagttcgttaaacagttttgccacgatctcgttatcacgagtacgggcgaatgccagacgacgattagcaacgctatcagtcttggcaagagtaatcagcggctcaactacgcggcgcagctctttcgctttaggcagagtcgtcttgatgatttcatgacgaaccagactacctgccatattgcggaacatagcctggcgatggctgctgttgcggttcagttgacgaccactcttacgatggcgcatgaccttatccttctcagtaaaaccttaacctgtgatccggttactcgtcagcgatgcttgccggtggccagttttccaggcgcatgcccagagacagtccacgggaagccagcacgtctttaatctcagtaagagattttttaccaaggttaggcgttttaaggagctcaacctcggtacgctgtaccagatcaccgatatagtggatagcttctgctttaaggcagttagcagagcggacagtcaattccagatcgtcaacagggcgcagcaggatcggatcgaactctggtttctcttctttcacttcaggctgacgtacatcacgtaagtcaacgaaagcttccagttgttcagccagaatggttgccgcacgacgaatcgcctcttcaggatcgattgtgccgttggtttccatttcgatgaccagcttgtccaggtcggtacgctgttctacacgcgctgcttcaacattgtaggcaatacgctccacagggctgtagcatgcgtcgaccagcagacggccgattgggcgctcatcttcttcgctatgaattcgggtagaagccggcacataaccacgaccgcgctgaactttgatacgcatgctaatagacgcgttctcatcggtcaggtggcagatcacgtgctgcggcttgacgatttcgacatcaccgtcgtgggtgatatcggctgcagtcacagggccaatgccagatttattcaaggtaagaataacttcatctttgccctgaactctcaccgccagccctttcaggttgagcaggatttccaggatatcttcctgaacgccttctttggtgctgtactcatgtagtacaccatcaatctcaacctcggtcaccgcgcaacccggcatgctactgagcagaatacggcgcagtgcgttacccagagtatggccaaagccacgctctaaaggctcaagggtcaccttggcgtgcgtgctactcacttgctcgatatcaaccaggcgcggttttagaaactctgtcacagaaccctgcattgtgtcctctctttggtactaagctttacttggagtaaagctcgacgatcaggtgttcgttaatgtccgcagacagatcagaacgctccggcttacgcttaaacgtaccttccatcttgccagcatcaacttccagccaggttggcttttcacgctgctcagccagctccagagcggctttcacgcgagactgcttcttcgctttctcacgaatgcttacaacgtcattcggactaacctgataagaagcgatgttaacaacacgaccgtttaccataattgctttatggctaaccagctgacgtgcttctgcacgagtggcaccgaagcccatacggtatacaacgttgtccagacgaccttccagcagagccaacaggttttcaccggtgttgcctttcagacgtgctgcttctttgtagtagttacggaactgacgctccagcacaccatagatacggcgaactttttgcttttcacgcaactgcacaccatagtcagacagacgcggtttacgcgcaccgtgctggccaggagcttgttcaattttacacttggtatcgatcgcgcgaacgccagacttaaggaataagtcggtgccctcacgacggctcagcttgagcttaggacccaaatatcttgccattttctttctccaacaaacctggaaaacgaggcgttatacgcgacgttttttcggcggacgacaaccgttatgagggatcggagtcacatcagtaatgttagtgatgcggaaacctgcggcgttcagagcacgaatagtagattcgcggcctggacccggacctttaaccataacttccagattcttgatgccgtattctttcacggcgtcagcgcaacgctctgctgcaacctgagctgcaaacggagtggatttgcgagaaccacggaaaccggaaccaccggctgttgcccaacccaacgcgttaccctgacgatcagtgatagtcacgatggtgttgttgaaagaagcatggatatgagccacgccgtcagagacttgttttcttacacgtttacgtgcacgaattggtgcctttgccattattcaatcaccccgattatttcttgatcggtttgcgcggacccttacgggtacgtgcgttggtcttggtacgctgaccgcgaaccgggagaccacgacgatgacgcaaaccgcgatagcaaccaagatccatcaggcgcttgatgctcatgctgatttcacggcgcagatcaccttcaacgacaaatttggcaacttcgtcacgcagcgtgtcgatttgtccttcagacagctcactgatcttaacatcttcagcgatacccgctgcagccaggatggctttagaacgggtcttgccgacgccataaatgctagttaatgcgattacggcatgcttatgatcaggaatgttaatgcctgctatacgggccactatgcactcctactatttaatatgtacgttccatgctgaaaagcccgttttcaggatactcaaatggaaacgcacagacatacaaaagattggctggctaatctagccagctcaacccaactttgcaagaaaaatatgcgaaaaaatcagccttggcgctgtttatgcttcggctcggcactgcaaatcacacggatgacaccatcacgcttaacgattttgcagttacggcataatttcttgacggaagcacgaactttcatttttactctccgtaacttctcgggcgaccaattatcggccgtagcctttcaggttcgccttcttcaatgcagactcatactgactggacatcatcagagtttgcacttgagccataaagtccataatcacgacaacaacgataagcagactggtcccaccgaagtagaacggtactttcattgcatcacgcatgaactccgggatcaggcagataaaggtaatatacagcgcaccaaccagggtcaggcgggtcattactttatcgatatacttcgccgtttgctctcccggacgaattcctggtacaaatgcaccggacttcttcaggttatctgctgtttcacgcgggttgaaaaccaacgccgtgtagaagaaacagaagaagatgattgcagacgcatagagtaacacataaagcggttgcccaggctgcaaatacaggctaattgttgtcagccagttccaaccagtaccgcccccgaaccaactcgcgatggtcgccgggaacagaataatactggaagcgaagattgccgggattacccccgccatattcactttcagcggtaaatgtgtgctctgtgcagcatagacacgacgaccttgctgacgtttcgcgtagtttaccacaatgcggcgttgaccacgctcaacaaatacaacaaagaacgtcactgcaaatactaatactgcaaccaacagcaacacgaggaagtgcaggtcgccttgacgcgcttgctcgatagtatgggcaatggctggcgggagtcccgcgacaataccggcgaagataatgatactaataccgttgccgatacctcgttcagtaatctgttcgcccaaccacatcaggaacatggttcctgtgaccagacttacaacagcggtgaagtagaatgcaaagcccgggttaatcaccaggccttgcataccaggcatattcggcagaccggtagcaataccgatgctctggaatattgccagcaccagagtaccgtagcgggtgtactggctgatcttacgacgaccagactccccttctttcttaatttctgccaacgttgggtgaaccaccgtcagcagctggataatgatgctcgcgctaatatacggcatgatccccagagcaaagatagaagcacggctgagagcaccaccagagaacatgttaaacatctcaatgatggtgcctcgctgttgctcaagcagtttggcaagtacagcggcatcaataccagggatcggaataaaagagccaatacggaacacaatcagcgcaccgataacaaacagcagtctgcgtttcagctcgcctaagccacctttggcactttgaaaatctaatcccggttgtttagccatctgctacttattcctcgattttaccgccagcagcttcgatagcagcacgagcgcctttagtaacacgcaggccacgaacagttaccggagtcgttacttcgccagccaggatcactttcgcgaactcgatctggataccgataatgttagccgctttcagcgtgttcaggtctactacaccgccttctactttagccaggtcagacagacgaatttcggctgtaatcgctgctttacgagaagtgaagccgaatttcggcagacgacggtacagaggcatctgaccaccctcgaaaccgcgacgtacgccaccgccagaacgagacttctgacctttgtgaccacgaccaccggttttaccgaggccagaaccgataccacgacccaggcgtttacccgcctttttggagccttcggccggagacagagtatttaaacgcatctcttactcctcaactttaaccatgaaggaaaccgcgttgatcataccgcgaatagcaggagtatcctcgcgctctacggtgtgaccaatacgacgcagacccaggccaagcagcgttgccttgtgtttcggcagacgaccgattgcactgcgggtttgagtaattttaatagtctttgccatggtttatttccccagaatttcttcaacggatttaccacgcttggcagcgaccatttctggagaattcatattttccaggccatcaatagttgcacgaaccacgttgatcgggttggtggaaccataggctttagccagaacgttatgaaccccagcgacttccagaacggcgcgcattgcaccaccggcgatgataccggtaccttcggaagccggctgcatgaatacgcgagaacccgtgtgaacacctttaacagggtgttgcagagtgccgttattcagcgcgacgttaatcatattgcgacgggctttttccatcgctttctggatcgctgctggaacttcacgcgctttaccgtaaccaaaaccaacgcgaccgttaccatcgccaactacagtcagagctgtgaaggagaaaatacgaccacctttaacggttttagatacgcggtttaccgcgatcagcttttcctgcagttcgccagcttgtttttcgatgtgagccatcttacacctctaccttagaactgaaggccagcttcacgggcagcatctgccagtgcctggacacgaccatgatattggaacccggaacggtcaaaggatacatctttgatgcctttttccagagcgcgttcagcgacagctttacccacagctgcagccgcgtctttgttaccggtgtacttcagttgttcagcgatagctttttctacagtagaagcagctaccagaacttcagaaccgttcggtgcaattacctgtgcgtaaatgtgacgcggggtacgatgtaccaccaggcgagttgcgcccagctcctggagcttgcggcgtgcgcgggtcgcacgacggatacgagcagatttcttatccatagtgttaccttacttcttcttagcctctttggtacgcacgacttcgtcggcgtaacgaacacccttgcctttataaggctcaggacgacggtaggcgcgcagatccgctgcaacctggccgatcacctgcttatcagcgcctttcagcacgatttcagtctgagtcggacattcagcagtgatacccgcaggcagctgatggtcaacaggatgagagaaacccagagacaggttaatcacattgcctttaaccgctgcacggtaacctacaccaaccagctgcagcttcttagtgaagccttcggtaacaccgataaccatactgttcagcagggcacgcgcggtaccagcctgtgcccaaccgtctgcgtaaccatcacgcggaccgaaggtcagggtattatctgcatgtttaacttcaacagcatcgttgagagtacgagtcagctcgccgtttttacctttgatcgtaataacctgaccgttgatttttacgtcaacgccggcaggaacaacgaccggtgctttagcaacacgagacattttttcctccgattaggctacgtagcagataatttcgccaccaagaccagcctggcgcgctgcacgatcagtcataacacctttagaggtagaaacaactgcgatacccagacccgccataactttcggcagctcatctttacgtttatagatgcgcagacctgggcggctgacacgctgaatgctttctacaacagctttgccctggaaatacttcagagtaagttccagttcaggcttggtgtcgccttcaactttaaaatcttcaataaaaccttcttccttcagcacgttggcgattgccactttcagcttggaggaaggcatggtgaccgcagctttgttcgcggcctgaccgttacggatacgggtcagcatatccgcgatcggatcttgcatgctcatctgtctttactcccgtgattcaattggtgacaattaccagctagcctttttcagacccgggatttcaccgcgcatagcggcttcacggaccttaatacggctcaacccgaacttccgcaggaaaccatgcggacgacctgtttgacggcagcggttacgctgacgagacgggctggaatcacgcggcagagtctgcagcttgagaacagcgttccaacgatcttcgtcggaagcgttcacatcagagatgatcgctttcagttcagcgcgtttcgcgaagtatttatcagctaaagctacgcgttttacttcgcgtgctttcatactttgcttagccatttagtaaccctaccttacttgcggaacgggaagtcaaaggcagccagcagagcgcggccttcttcgtcagatttcgcagtagtggtaatggtaatatccaaaccacgaacgcggtcgactttatcgtagtcgatttctgggaagatgatctgctcacggacacccatgctgtagttaccacgaccgtcgaaagacttagcggacaggccacggaagtcacggatacgaggtacagcaatagtgatcaggcgctcaaagaactcccacatgcgttcgccacgcagagttactttacagccgatcggatagccctgacggattttgaagcctgcaacagatttgcgtgctttggtgatcagcggtttttgaccggagattgctgccaggtctgctgctgcgttatccagcagttttttgtcagcgatcgcttcaccaacacccatgttcagggtgatcttctcgacccgagggacttgcatgacagaattgtagttaaactcagtcatgagttttttaactacttcgtctttgtagtaatcatgcagtttcgccatcgtactactccaaattacttgatagtttcgctgttagacttgaagaaacggacttttttaccgtcttcgaatctaaagcctacacggtcagccttgccggttgccgcattgaagattgctacgttggaaacctgaatagcggcttctttttcaacgatgccacccggttggttcagggccggaaccggcttctgatgtttcttaaccaggttgataccttcaacaatgaccttgccggaagacaggacattcttaactttaccgcgtttacctttatctttaccggttaacacgataacttcgtcatcacgacggattttcgctgccatgattcgctccttagagtacttctggtgccagagagataattttcatgaacttctcactacgaagctcacgagttaccggcccaaaaatacgcgtaccgataggctgctcgctgttgttgttcagaagaacacaagcattaccatcgaagcgaatgacagaaccgtccgggcgacgaacacccttcttggtgcgcaccactaccgccttcagcacatcaccttttttgaccttaccacgcggaattgcttctttgatggtgatcttgatgatgtcgcctacgcctgcgtagcgacggtggctgccacccagaaccttgatacacattacgcgacgtgcaccggagttgtcggcgacgttcagcatagtctgttcttggatcattttagtgctccgctaatgtcaactactactgagacccgaaaatcaggtcgttaaaaatccccatatcgagggcgcggcattataacaccgcttcaaggatatgggtagaaaaaataaacggctcatttctgagccgtttattcgtattgagagagtgtactgtattacagaaccgctttctctacaacgcgaaccagcgtccaggatttagtcttggacagcggacggcattcgcggatttcaaccacgtcaccgataccgcattcgttgttctcgtcatgtacgtgcagtttggtcgtacgcttgatgaatttaccgtagatcgggtgtttcacaaaacgttcgatagcaacaacaatggatttctccattttgtcgctaacaacgcgaccttgcagagtacggattttatcggtcattacgcacccgccttctcgttcagtaaagtcttaacgcgtgcgacatcgcgacgcacttgcttcaacaggtgagactgttgcagctggccacttgcagcctgcatacgcaggttgaactgctcacgcagcaggttcagcagctcggtgttcagctcttcaacgctcttctcacgcagctcttttgctttcattacatcaccgtcttagttacaaaggtggttttaatcggcagtttcgctgctgccagcttgaatgcttcacgggccagctcttccggaacaccgtccatttcatacaggactttacccggctgaatcaaggcaacccaatactccacgttacctttacctttacccatacgcactgccagcggcttttcagtgatcggtttgtccgggaacacacggatccagatcttaccttgacgcttaactgcacgggtcatagcacgacgtgctgcttcgatctgacgggcagtcagacgaccacggccaacagctttcagaccgaagctgccgaagctaacatccgtaccctgcgccagaccgcggttacggcctttgtgcattttacggaattttgtacgctttggttgtaacatcagcgacgctccttatttacggcctttacgctgctgctttttaggctgagcagccggtttttccggttgttcaacagcagccataccacccaggatctcgcctttgaagatccacactttaacgccgattacaccgtaagtggtgtgcgcttcagaggtgttgtagtcgatgtcagcacgcagagtgtgcagcggtacgcgaccttcgcggtaccattcggtacgtgcgatttccgcgccgcccagacggccgctaacttcaactttaatacctttagcgcccagacgcattgcgttctgtacagcacgcttcatagcacgacggaacataacgcgacgttccagctgagaagtgatgctgtcagcaaccagttttgcgtccagttcaggcttacgaacttcggcgatgttgatctgtgcaggaacgccagcgatgtccgctacgaccttacgcagtttttctacgtcttcaccttttttaccgataacgatacccgggcgagcagtgtgaatggttacacggatgctcttagccggacgctcgataacgatacgagatacggacgctttagccagttccttagtcaggtactgacgtactttaaaatcgctgtccaggttgtcagcgaattctttggtgttcgcaaaccaggtagagttccatggttttacaatacccaggcgaataccattaggatgtactttctgacccattgctagtctccagagtctcagcgatcggacacaaccacagtgatgtggctggtgcgcttcaggatgcgatctgcacgaccttttgcacgcggcataatgcgcttcatgctcgggccttcgtctacgaaaattttcgtaactttcagatcgtcaatgtcagcgccatcgttgtgttcagcgttagcaatggcagattccagaactttcttgaccagtacagccgctttcttgttggtgtaggtcaaaatatccagagcctggctcactttcttaccgcgaatcaggtcagcaacaaggcgaaccttctgagcagaagaacgagcatggcgatgtttagcgatagtttccatctcttcctcctaccttatttcttcttcgcttttttatcagcagcgtggccgcgataagtacgagtcggtgcgaattcacccagtttgtgaccaaccatttcgtcggttacaaataccggaacgtgctgacgaccattatggacagcgatggtcaaaccgatcatgttaggaaagatcgtactacgacgggaccaagtgcgcaggggcttcttgtctccgctttccaccgctttctctaccttcttcagcaagtgcaggtcaataaaaggacctttcttgagagaacgtggcatggcttatcctctaaaattatttgctacggcgacgtacgatgaatttatcagtacgcttgttgctgcgggtcttcttacctttggtctgaacgccccacggagttaccgggtgcttaccaaagttacgaccttcaccaccaccatgtgggtggtctaccgggttcatcgcggtaccgcgaacggtcggacgaacaccacgccagcgtgcagcacctgctttacccagaacgcgcagcatatgctcagcattgccaacttcgcccagagttgcacggcagtctgcttctactttacgcatttcaccagaacgcagacgcagggtgacataagcaccatcacgagcaacgatctgaacgtaagtaccagcggaacgtgccagctgaccgcctttacctggtttcatttctacgttatgaacagtagaaccaaccgggatgttgcgcatcggcagggtgttacctggtttgattgcagcatcaacgccagactgaatctggtcgccagctttcaggcctttaggggccaggatgtaacggcgttcaccgtctttgtacagaaccagcgcgatgttcgcggaacggttcggatcgtactcaagacgttcaacaactgccgggataccgtctttgttgcgtttgaagtcaacaatacggtaagcctgcttgtggccaccaccgatatgacgagtggtgatacggccattgttgttacgaccaccggatttgctgtttttttccagcaacggagcaaaaggtttgcccttgtgcagctcagggttaaccactttaactacgtggcgacgacccggagatgtcggtttacatttaacaactgccattgtattactcctccgacttactcagcgccgccaacgaagtccagattctggccttctttcagggtgacgtaagcttttttccagtcgctacgacgaccgatacgctgtccgtgacgtttaactttccctttaactaccagggtgttaacgacttcgacttcgacttcaaacagtttctgcacagcagctttgatttctgctttggtcgcgtctttagcaactttgagtacgatggtgttggatttttccatcgcagtagacgctttttcagaaacgtgcggtgcacgcagcaccttcagcagacgttcttcacgaatcatgccagcatctcctcaacttgcttaacagcatcagcagtcattacgactttgtcgaaggcgatcaggctaaccgggtcgataccagttgcatcgcgtacgtcaaccttgtgcaggttgcgcgcagccaggaacaggttttcgtccagctcaccggtgatgatcagcacatcttccagagccatgtctttcagtttctgtgccagcagcttagttttcggcgcttctacagagaacttctcgacaacgatcagacgatcctgacgtaccagttcggacaggatgcttttcagcgcgccgcggtacatcttcttgttaactttttgactgtggtcctgcggacgagcagcaaaggtcacgccaccagaacgccagatcgggctcttgatagaaccagaacgcgcacggccggtgcctttctggcgccacggttttttaccggaaccagttacttcagcacgagtcttctgagcacgagtaccctgacgagcaccagctgcataagcaacaacaacctggtgaaccagcgcttcgttgaaatcacgaccgaaggtagtttcggaaacagtcagcgcgctctgcgcgtctttcaatactaattccattgctatctccttacgccttcacagctggtttaacgatcaggtcgctaccggttgcacccgggacagcacctttaaccagcagcaggttgcgctcagcgtcaacgcgtactacgtcaaggctctgaacggttacacgttcgttacccatctgacctgccattttcttgcctttgaacactttgcccggagtctggttctgaccgatagaacccggaacgcggtgagacaaggagttaccgtgagtagcgtcctgggtacggaagttccagcgcttaacggtacctgcgaaacctttacctttagaggtgccagttacgtcaacttttttaacgtcagcaaacagttcaacgctaatgctctgacctacagtgaactcttcgccttcagccaggcggaattcccacagaccacggccagcttctacgccagctttagcgaagtggccagcttcaggcttggtcacacggttagcttttttagcaccggtggtcacctgaatagcacggtagccatcgttagccaggtctttaacctgagtaacgcggtttgcttcaacttcgattacggttactgggatagaaacgccgtcttctgtgaagatacgggtcatacccacttttttaccgactaaaccaatcattgtttcaacctctcaatcgctcaatgacctgattaacccaggctgatctgcacgtctacaccggcagccagatccagacgcatcagagcatcaacggttttctcggttggctcaacgatgtcaaccagacgcaagtgagtacggatttcgtactgatcgcgcgcgtctttgttgacgtgcggggagatcagaacagtgaagcgctctttgcgtgtcggcagcgggatcggaccacggacctgcgcaccagtgcgcttggcagtctcgacgatttccgcggttgcttgatcgatcagacgatgatcaaacgctttcaggcggatacggattctttggttctgcatgagaccagagctccaattattttataaacgaaaatgattactcctcagacccattacgattgatgggagagtgtaaccgttcttacgtagctccccgattgggagcattgttaggtagccaaattcggctaactgaggttcagattgaacctgctgtcaactacgacaagcccgcgcattatacatacttaaccaccgaacgcaagcgtattgctagtaaagtaaacagccttcgggttatctctcaagttcgttcagtgcatttttgacacgctctcttaaaccggctttctcttcgctttcttccacagtattttcttcgtcttcagaagaagagggggcattctcaaccgcgacgcctgggtcatcttcctcctcgacggattcgacgacggggagtggctgttttttgaagaaatagtgttgtgtactttgtttaaaagcgggcgtttcagcctctacagtgacttcggcttttactatccaaagcacccatagctgcctggcatacccaccaaccagcaccattcctgcaaaccacaggcaaatcagtaataaacaaattacatatattatggtgctgtgtttttgtcgggagaagataccagggtgacctgtttctttctgctcacgcgcggcgatatagaattcaaacattataatcccttgtgacgtaaaaactgcaaaacaaaagtcctacgcaggaattatttacgttttacgagaacccttcaatatgaattaaattacggcattaaaaataagaaaaaagcctgacaaatgaagcattttaaaaacagaaacattcatatttaaaatgttaaattgaattgatattttaaatatgaataatttattcgttctgacagtacgaataagatatgccgtcaacaaatgcaaaaagggcgccgaagcgcccttttcaattcaaaactaattaacgtgtaattagcccagaactttagcaacaacgcccgcgccaacggtacggccgccttcacggattgcgaaacgcagaccgtcgtccatcgcgatcgggtggatcagggtaacaaccattttgatgttgtcgcccggcattaccatctctacgccttccggcagttcgatggtaccagtcacgtcagtagtacggaagtagaactgcggacggtagcctttgaagaacggagtatgacggccgccttcatctttggacagaatgtacacttcagattcgaacttggtgtgcggcttgatggtgcccggcttagccagtacctgaccacgttcgatttcttcacgtttgataccacgcagcagaacacctacgttctcaccagcacggccttcgtccagcagtttgcggaacatttcaacgccagtacaggtagacttctgagtctctttgataccaacgatttcaacttcttcaccaactttgatgataccgcgttctacacgaccggtaacaacggtaccacgaccggagatggagaatacgtcttcgatcggcagcaggaacggcttgtcaatcgcacgctctggttccggaatataagaatccaggaagccagccagttccaggattttcgcttcccactctgcgtcgccttccagcgctttcagagcagaaccacgaacgatcggagtgtcgtcgcccgggaagtcgtactgagacagaagttcacgaacttccatttcaaccagttccagcagctcttcgtcatcaaccatgtcgcatttgttcaggaacacgatgatgtacggaacgcctacctgacgacccagcaggatgtgctcacgagtctgcggcatcgggccgtcagtcgcagcaactaccaggatcgcgccgtccatctgagcagcaccggtgatcatgtttttaacatagtcggcgtgccccgggcagtctacgtgtgcgtagtgacgggtcggggtgtcgtattcaacgtgagaagtgttgatggtgataccacgagctttttcttccggcgcgttatcgatctggtcgaatgcacgagcagcaccgccgtaggttttagccagtacggtggtgattgcagcggtcagagtagttttaccgtggtcaacgtggccgatagtaccaacgttaacgtgcggttttgtacgttcaaatttttctttagacacggctatattccttactatagtgctctccccttcaggagagagcacgggactttggtattaacccttaggcttatttaccacgggcttcaattacggcctgagcaacgttactcggcgcttcatcatacttcaggaattccatagtgtaacttgcacgacctttggtcagagaacgcagctgagttgcgtatccgaacatttcagacagcggtacttcagcgtggatcttaacgccagtaacttcagattcctgacctttgagcataccacgacgacggctcaagtcaccgataacgtcaccggtgttctcttccggagtttctacttcaaccttcatgatcggctcaagcagaactggtttcgctttcttaaagccttctttaaaggcgatagaagcagccagtttaaacgccagttcagaggagtcaacgtcatggtaagaaccgaagtgcagacgaatacccatgtctactaccgggtagcctgccagcggacctgctttcagctgttcctggatacctttatcaacggccgggatgtattcgccagggattacaccacctttaatgtcgttgatgaactcgtagcctttcgggttactacccggctccagcgggtacatgtcgataacaacatgaccatactgaccacgaccaccagactgtttcgcgtgtttaccttcaacatcggtaactttctggcggatagtttcacggtaagcaacctgcggtttacctacgttcgcttcaacgttgaattcacgcttcatacggtcaacgatgatgtcgaggtgcagttcgcccatacccgcgatgatggtctggttagattcttcgtcagtccatacacggaaagacgggtcttctttagccagacggcccagagccagacccattttttcctggtcagctttggttttcggttcaactgcgatggagattaccggctcagggaattccatacgttccagaatgatcggcgcatccgggtcacacagggtgtcaccagtggttacgtctttcagaccgatagcagcagcgatgtcgcccgcgcgaacttctttgatctcttcacgtttgttagcgtgcatctgaacgatacgaccgaaacgctcacgtgcagctttcacggagttcagtacggtatcaccagagttaaccacaccggagtaaacacggaagaaggtcaggttaccaacaaacgggtcggtagcgattttgaacgccagtgcagagaacggctcgtcatcacttgcgtgacgttcagccggagtgtctttaccgtcgtccaggataccgttgatcgcaggtacgtcaaccggggatggcaggtaatcaattaccgcatccagcatcgcctgaacacctttgttcttgaacgcagaaccacaggttaccaggatgatttcgttgttcagaacgcgctgacgcagagcacctttgatttctgcttcagtcagttcttcaccacccaggtatttttccatcagctcttcagaagcttcagctgcggattcgatcaggttctggtgccattcgttagccagttcaaccatgtctgccgggatatcttcgtattcgaaggttacgccctggtcagcgtcgttccagttgatagctttcattttcaccaggtcaacaacaccggtgaaatgttcttcagcaccaatcgccagctgcagcggaaccgggttcgcgcccagacgggttttgatctggttaacaactttcaggaagttcgcacccatgcggtccattttgttaacgaacgcaatgcgcggaactttatatttgtttgcctgacgccatacggtttcagactgcggctgaacaccaccaactgcgcagtaaaccattaccgcaccatcgagaacacgcatggaacgttctacttcgattgtgaagtcaacgtgccccggggtgtcgatgatgttgatgcgatgcggctcatactgcttagccataccagaccagaatgcagtagtcgcagcggaagtgatggtaataccacgttcctgctcctgctccatccagtccatggttgcagcgccgtcatgaacttcaccgattttatggtttacaccggtgtagaacagaatacgttcggtagtagtggttttaccggcgtcgatgtgcgcactgataccgatgttacggtagcgtgcgatgggtgttgtacgagccatttgtttcctcgtttatcttttaggcgttcaatttaagtagcccaaagcgggctgcttactggaagcgcccgcctggtgactaaaactccgaagggataaccaacggtagtgtgcgaacgccttgttggcttcggccatacggtgaacgtcttcacgtttcttaactgcagtacctttgttttctgcagcatcagaaagttcgttcgccaggcgcagagccatggatttatcaccgcgtttacgagcagcttcaacgatccaacgcattgccagagcattacgacgaaccggacggacttcaactggtacctgataagtagaaccaccaacgcggcgagacttaacttctacagtcgggcgcacgttttcgagagctacttcgaatgcttccagttcagatttaccagagcgctgagccagggtctccagcgcgctgtatacgatagattcagcagtagattttttaccatctaccatcaggatatttacaaatttagccagcagttcacttccgaacttcggatccggcagaattttacgctgaccaatgacgcgacgacgtggcatggaaatactccgttgttaattcaggattgtccaaaactctacgagtttagtttgacatttaagttaaaacgtttggccttacttaacggagaaccattaagccttaggacgcttcacgccatacttggaacgagcctgcttacggtctttaacgccggagcagtcaagcgcaccacgtacggtgtggtaacgaacacccgggaggtctttaacacgaccgccacggatcaggatcacggagtgctcctgcaggttgtgaccttcaccaccgatgtaggaagtcacttcgaaaccgttagtcagacgaacacggcatactttacgcagcgcggagttcggtttacgaggagtggtagtatatacacgagtacatacgccacgtttttgcgggcatgcttccagcgcaggcacgttgcttttcgcaactttgcgagcacgtggtttgcgtaccagctggttaactgttgccattaaatagctcctggttttagcttttgcttcgtaaacacgtaataaaacgtcctcacacaatatgaggacgccgaattttagggcgatgccgaaaaggtgtcaagaaatatacaacgatcccgccatcaccaggccatctggctggggtgcttaaccgtaagtctgacgaaatcagtatagtcaatgagaatgatgtcgttgctaatttgaccagtcaaaccgcgggcaataaggtcttcgttcagggcatagaccttaatgggggcattacgcagactttcaaggtagcggttaccgtcaactgcggcagttacgccatcttgcaataatagcagttcgtctccttcactgagcagacgcagcagcgcagcaaaatccgtcagccagggactgcgatgtaatgtgtgcagcataaacgcctcaaaacctcaaaataacatcgtagttggcgagttcgcggcgtaaggcatctgcttcgagcggcgtggcttcgacaacaaagggtgtctgcggatctaacccgcgttcgcgcagactagccgcacaaacccagcactgttcaatgtcgtacagacccaacaatttaaaagtggcaatgtaatcacgcgccagcactgcatcgggcttttgtcctggcagcagctgaaaaacgccatcagctataaagaagacagccagatcgtcagttaatgcggaagttgccagtaaagcatctaaaccttcccggcctgcggctgtaccatgaggtgcagtagaaaaaacaaacgcaattcgtttcatcagaactgtaccaccctgtcacaggtcaggctggcttccgccagcgccccaagtccgcttaaggtaaatccctgctgaaggttactgctagccagccccagtcttccggcctccgtttcatcaacaacgccacggcgtaatgctgccgctacgcagatattcagcgccacaccatgttgcgcattcagttgttgccaggcccgtacgaggtcaaattcgtcacttgccggagaggtcaattggttagcgttatagaccccttcccgatagaaaaagacgctgcttaactcatggccatctgctatcagcgcctgcgcaaactgaaaagcactactcgcctgttgcgtaccgtatgctggcccggtcaccacgatggcaaaacgcattacttatcttgcccctggaaatcaccgctcttgaactggcggatgtagagatagacagtgtgtttggagatgttcaggcggtcagcaacctggttgatcgcatctttaatatcgaagatccctttctcgtagagattcagcacgatctgacgatttttggcgttattagaaacattgcgatcggcattcacttcttcgatggtgaactccagcgtttgggtaaccagatcttcaacagaagaggcaaagttgacgctactaccgacatccggggtttctggcggcacaaaggtgctcataatctggctgaagggaacatcaagattcatattgatgcacagcagaccaattacacgctgttcgcggttacgaatcgcgatagtcagggacttcattaatacgccgcttttggcgcgagtaaagtagcatttagaaacgctgctatccgctcccgtcatatcgtgcagcatacgtagcgccaggtcagtaattgggctaccaatcttccggcctgtatgttcaccgttagcaatgcgaatggcactacattttagatcctgcaaagagtgcaaaacgatttcacagtgggagccaataagcatcgctaacccgtccaccaccgcttcgtaggatttcagaatatcaaaatcggtctggtcgaaaggacgttgatccagtaaatccaactcactggtttcgttggttaaaaggctcctggacatgaaaaaaaacactccttttcaggagcctgtcgttaacttttcagggcaggctcattaatgatgcgggtaactaaattaatacagcggaggttccgctttccagcactaattatatccggcctgtaataaaaaaaccgccgcctggtcaggcggcggttcttaatgcttattttttagcagaatctgcggctttcgcatcagcttccggctttgcatcagccttcggcgctggtttcacatccagcagctctacgtcaaacaccagggtagaattcggtgggatccccggaacacccgctttgccgtaagccagttctggtggaataaccagtttgatcttaccgcctttcttgatgttcttcagaccttctgtccaacccgggataacaccgtccagacggaaagaaagcggttcaccacgggtgtaagagttgtcgaactctttaccgtcgatcagcgtacctttgtagttcactacaacagtatcgctgtctttcggtgcttcgcctttaccggcttctactacctgataaaccagaccagtactagaggttttcacacctttctctttggcaaatttctcgcggtactctttaccttttgcttcgttatcagccgcgtctttttccatcttcgcctgagcagaagacttcacgcgagcttcgaatgcttgtagagtctgttcgatctcttggtcggagagtttgcttttatcagcaaatgcatcctgaacaccagcgatcagctgatctttatccagtttgatgcccagtttttcttgttcttttagagagttttccatgtaacgacccaggctggcacccagtgcataagcacttttctgatcgtcatttttgaacgctgctttgctgtcagcagctgtagcaggttttgcagcttcagcagcaaaagtgattggtgcatgcagggcaacggccattgtggtcgccagcagcgttactttaaacagacttttcatccatatctccaggatcggggcatctcaccccagggttaactattatcagaagggtactataaagcgttgtcgaacaaatctacatacagacacgccctattatcatctattttcagactctttttgtttaaattagtttcgatgaccgcgaaatgagtgctgtctcgggcagcaaagttaagtagaatccgcggcgaccattcgacaaaagaggtgaatcatgcaggatttaagtttggaagcacgcctggcagagctggagagccgactggcttttcaggaaatcaccattgaagaactgaacgtcacggtgaccgctcatgaaatggagatggcgaaactgcgcgatcatctgcgtctgctgaccgagaagttaaaagccagccagccgagcaacatcgcgagccaggctgaagaaacgccaccgccacattattgaggcgtaaaaaaagcggggattccccgcttttttgtcactttttcggtattagtggcaaccgcaaccgccgttgcctttaccgccacagcagccttcgccaccgtgttcatgaccgtgatcgtggccatgaccgccgcagcaaccgtcgtggtcgtgatcgtggtggtgatcgtgcgcgccgtgaacgtgaccatgagccagttcttcttcagtcgcttcgcgaatcgccacaacttcaacgttgaatttcaggttctgaccggccagcatgtggttaccatcaaccacgacgtgatcgtcttcaaccgcagtgatttcaaccggtaccggaccctggtcggtttcagccaggaaacgcatacctacctgcagttcatcaacgcccataaatacgtctttaggaacacgttgcaccaggttttcgtcgtactgaccgtaagcgtcgttcgcgccaacagcgacatcaaatttgtcgccaacttcatgaccttccagcgccgtttccaggccagagatcagggaaccgtgaccatgcaggtagtccagcggcgcactcaccggagactcatcaaccaacacaccgtcttctgtacgtacctgataggccaggctgaccaccaggtcttttgctactttcatgatatctcctgagcatgggaagaatagtggcgcagattgtagcggaattctgcagccgtgtactcactagcttaaaaaaactcggcgcatatcgttagtccggatgaaaaatcccgatcacttgctcatctttgcgaacgtgatcgcgggcttctttgtctgcttctcgcatctgatgtccgcacttaacacattcaacaatatcaatattattttcgcgccacatcgccatactatcctgcgcctgacaggccgggcattttgcgcccgcaataaaacgttttcggattgccatctttaccctttactcaaattcatcccagccgtccagctggcgtcgttcttgttgcatttcacgctggaaaatctcttccagttcgcgtcgggcttccctggcgcgagaaatttgtacggtatcggcatgcattgggatgagctctcgcagcatccgcatatccaggcggcgaaaatgcagttgcgctcgctgtgcctgatgcggatgcatgccaagcgtgaccagcgtcttgcgccccagctctaacgcactggagaatgtttcacgggaaaactgcgtcacccctgcctgtaataactcatgcgcttccacacgtccgcgcgctcgcgcaagaatatgcaaatgcggaaagtgctgttggcatatttccaccagcttcatggtgtcttccggctcgttacaggtaatgacgatagactcagcggcctctgcacccgcagaacgtaaaagatcgacctgcgtggcgtcgccgtaataaactttgtagccgtatttacgcatcaggttaacggcgctgatatcccgctccagcacggtaatgcgcattttatttgccatcagcaaacgaccaatcacctgaccaaaacgcccgaagcccacgacaatgacctggggtttatcatcgttgacccacggtttttcgtcttcttcttccggtccgttaaactggcgggatagccatttatccaccagcttcatcagcaacggcgtggtcatcatggaaagcgtcaccgtcaccagcaacaacgccatctggtcgccctggaataagcgttgactagaagcggtagaaaagaggacaaaggcaaactcaccaccctgactcaacacgccagcaaactgcatccgctcactgctacgcacgccatacaatcgcgccagcagatacagcacgagaattttcaccgccaccagcacaaccacgcttatcactacccacaacagatgggtataaagcaccccgaggttgagactcatgccgacagagataaagaacaaaccgagcagcaagcctttgaagggatcgatagccgtttccagttcatggcgatattcactttccgccagcagcacgcccgcaataaatgtaccgagcgccatgctcagccccagcgcatccataaacaatgcggaacccaacaccagcagcagcgtcgcggcggtgaacacttcccgcacgccagaagctgcaataaagcggaataccggacgcagtaaatagcgcccaccaatcagcatgccgacaaacgccagcaccttcatgccgaccttcatccagtcgaaatgttcgtctgcgctccccgccaacaacggcactaacgccagtgctgggattactgccagatcctgaaacagcagaacgctaaacccgagctggccggattcgctgcgattcatccctttctcacgcatcaattgcaacgccattgcagtactagacatcgcaaggccaatgccaccgaccaccgccgcctgccaggcgaaatccgtcagcatcaataatcccgccagcaacgccgcgcttaacagcacctgtgccgcgcctacgccaaaaatgctacgccgcagttgccaaagtttggagggattcaactcaaggccgatgataaacatcaggaataccacgccgagttcgctaaagtggaggatctcatcgacgtcgctaataaaccccagcccccacgggccaattgcaatccctgccagcaaatatcccaacacagcgccaatacccagccggcttgccagcggcaccgcagccaccgccgcgaagagaaacagcactcctgcgagtaaaaaatcggaaccttccatcagcggcctcctggagacagcggatttgccagccagtcaccgtaggctctggcgtggctcgccagctcctgtgcgctttgccgtctcgcccagtaaataatgatgggacttaaccaatgcatccggcacatgcccgccgccagttcaaaggggcgcagcacatcgctcatcgggtagcgattcagcgcgtcataacggtaagcactttccggctcgccggtggtaatcacgctacgccagtactttcccgccagttggtttcctcccggcccgctggcaaaaccacgacttaatacccggtccagccactctttcagtagcgccgggcagctataggtataaagaggatgctgaaagacaatcacctcgtgctcgcgcagtaatgcctgctcacgggggatatcaataaaaaaatcgggatagtgcgcgtaaaggtcgtgcacggtaacattgctgagctgcgtggccggtttaagcagtacccggtttgccacgctgtcctgagattccggatgggcatacagcagcaaaactttcgctggctgagacatcatccccctcccggtatggtttttgtgtatagtcgctgttttgggctaccattgcgcccggtgcggcagctcgcccatacattacattatcataatgataagttaacatagtctgaacatacggcaccttatgattgttttctccagcttacaaattcgtcgcggcgtgcgcgtcctgctggataatgccaccgccaccatcaaccctgggcagaaagtcggcctggtgggtaaaaacggctgtggtaaatctaccctgctggcattgctgaaaaatgaaatcagcgccgacggcggcagctacacctttccgggaagctggcaactggcgtgggtgaatcaggaaacgccggcgttaccgcaagcggcgctggaatatgtcattgacggcgaccgtgaatatcgtcaactagaagcgcagctacacgacgccaacgaacgtaacgacgggcacgccattgcgaccattcatggcaagctggatgctattgacgcatggagtattcgctcccgtgctgccagcctgctgcacggcctcggtttcagcaatgaacaactggagcgcccggtaagtgatttttccgggggctggcgtatgcgtcttaaccttgcccaggcgctgatttgccgtagtgacttgctgctgctcgacgaaccgactaaccacctcgatctcgatgccgttatctggctggaaaaatggctgaagagctatcagggcacgctgatcctgatctctcacgaccgcgacttcctcgatccgatcgtcgataaaattattcatatcgaacaacaaagcatgttcgagtacaccggcaactacagtagctttgaagtacagcgcgccacccgtctggcgcagcaacaagcgatgtacgaaagccagcaggaacgcgtagcgcatctgcaaagttatatcgaccgtttccgtgccaaagccaccaaagcgaagcaggcccagagccgcattaagatgctcgagcgtatggagctaattgcccccgcgcacgtcgacaacccgttccgctttagcttccgcgcgccggaaagcctgccaaatccgttactgaagatggaaaaagtcagcgcgggctatggcgatcgcattattctcgacagcattaaactgaacctggtgcccggcagccgtattggtctgttaggccgcaatggcgcgggtaaaagcacattaatcaaactgttagccggtgaacttgcgccagtcagcggtgaaattggtctggcgaaagggatcaaactcggctacttcgcccagcatcaacttgaatacctgcgcgccgacgaaagtcctattcaacatctggcacgtttagcgccgcaggagctggaacaaaaactgcgtgactacctcggcggctttggtttccagggcgataaagtaaccgaagaaacgcgccgcttctccggtggggaaaaagcccgcctggtgctggcattaattgtctggcagcggccgaatctgctgctgctcgacgaaccgactaaccaccttgacctcgacatgcgtcaggcactcaccgaagcattaatcgagtttgaaggcgcgctggttgtcgttagccacgaccgtcatttgctgcgttccaccactgacgatctctacctggttcacgatcgtaaagtcgaaccgttcgacggcgatctggaagattatcaacagtggttgagcgacgtacaaaagcaggaaaaccagaccgacgaagcgccaaaagagaatgcgaacagcgcccaggcacgtaaagatcagaagcgtcgggaagctgagctgcgtgcgcaaacccagccactgcgtaaagagattgcccgtctggaaaaagagatggagaagctgaacgcgcaactggcgcaggcggaagagaaactcggcgacagcgaactgtatgaccagagccgtaaagcggagttgaccgcctgcctgcaacagcaagccagcgccaaatccggcctggaagagtgcgaaatggcatggctggaagcccaggagcagcttgagcagatgctgctggaaggccaaagcaactgatggcgcagataacgacgaccgatgccaatgaattcagcagcagtgctgaattcatccccatgcgcggctttagcaattgtcatctgcaaaccatgctgccgcgtctgtttcgtcgtcaggtgaaattcaccccgtactggcagcggctggagttgcccgacggcgattttgtcgatcttgcgtggagtgaaaaccctgcacaggcgcaacataaacctcgtctggtggtgtttcacgggctggaaggcagtctcaacagcccttacgcccacggtctggttgaggcggcgcaaaagcgcggctggctgggcgtggtgatgcattttcgcggatgcagcggtgaaccaaaccgtatgcaccgcatttaccatagcggcgaaaccgaagacgccagttggtttttacgctggctgcaacgcgaatttggtcatgcgccaacggctgccgtcggctatagcctcggcggtaatatgctggcctgtttgctggcaaaggaaggcaatgatctcccggttgatgcggcggtgattgtctctgcgccgtttatgctggaagcctgtagctatcatatggaaaagggcttttcccgcgtttatcagcgttacttgctgaacctgttaaaagccaatgccgcgcgcaagctggcagcctaccccggaacgctgccgattaatctcgcgcagttaaaaagcgtacgtcgcatccgtgaatttgacgatctcatcaccgccagaattcacggctacgccgacgctatcgactattatcgtcagtgtagcgccatgccgatgctgaaccggatcgccaaaccgacgctgattattcacgccaaagacgatccgtttatggatcatcaggtgatcccgaaaccggaaagtctccccccgcaggtggagtatcaactgactgaacatggcggtcatgttggctttattggcggtacattacttcatccgcaaatgtggctggagagtcgcattcctgactggttaacaacgtatctggaggcgaaaagttgttgatattaacgtatctggaggcgaaatcatgttgattccgtggcaagacctctcccccgaaacgctggaaaatttaattgaaagctttgtgttacgtgaaggcaccgattatggtgaacatgagcgtacacttgaacagaaagtcgccgacgtcaaacgccagctacagtgcggagaagcggtgctggtatggagcgagctgcacgaaacggtcaatattatgccgcgcagtcagtttcgcgaataacctgcaaccgtcggcggacgagataataatgatagctaagtcatggagttactatgtctgccaaacatccggtcattgcggtaacaggatccagcggcgcggggaccaccaccaccagcctcgcgtttcgtaaaatattcgcgcagttaaatctgcatgcagctgaggtggaaggcgacagttttcaccgttacacccgcccggaaatggacatggcgatccgcaaagcgcgcgacgccgggcggcatatcagctacttcggccccgaggctaacgacttcggcctgctggaacaaaccttcattgaatacggtcagagcggcaaagggaaatctcgcaaatatctgcatacctacgacgaagccgtaccgtggaatcaggtaccggggacattcaccccctggcaacctttaccggaacccactgatgtactgttttatgaaggtttacacggcggcgtagtcacgccacagcataacgttgcgcagcatgtggacttactggtcggcgtggtgcctatcgttaaccttgagtggattcaaaaactgatccgcgacaccagcgagcgcgggcacagtcgagaagcagtgatggacagtgtagtgcgtagtatggaagactatatcaactacatcacaccgcagttttcccgcacccatcttaacttccagcgcgttcccaccgtcgacactagtaacccgttcgcggcaaaaggtatcccgagcctcgatgaaagctttgtggtgatccattttcgtaatctggaagggatcgatttcccctggctgctggcgatgttgcaaggcagtttcatttcccacatcaatacgttagtggtaccgggcggcaaaatgggtctggcaatggaattaattatgctgccgctggtgcaacgattgatggaaggaaagaaaatcgagtaactctgctattacgccggataaaatactatccggcttcacaacgggatagttaagtcacgcggcaaccacttcatagctgtgagtaatattcaccgctttttccagcatcaacgccacactacaatatttctcggcagagagatcaaccgcacgcgcaaccgctgcgtctttcaggtcgcgaccggtgacgataaaatgcagattaatgtgcgtaaacaggcgtggtgcctcttcgcggcgttcagaggtcaattttacttcacaatcgaccacatcctgacgccctttttgcaggatgctaaccacatcgatggcactgcaaccacccgccgccatcaacaccatttccatcggacttggtgctttatcgccactgttgccgtccattaaaatctgatgaccagaggcggattcgcccagaaaagttaacccttcgacccacttcactcgcgcttgcatttttgctactccactgcgtcaattttcctgacagagtacgcgtactaaccaaatcgcgcaacggaaggcgacctgggtcatgctgaagcgagacaccaggagacacaaagcgaaagctatgctaaaacagtcaggatgctacagtaatacattgatgtactgcatgtatgcaaaggacgtcacattaccgtgcagtacagttgatagccccttcccaggtagcgggaagcatatttcggcaatccagagacagcggcgttatctggctctggagaaagcttataacagaggataaccgcgcatggtgcttggcaaaccgcaaacagacccgactctcgaatggttcttgtctcattgccacattcataagtacccatccaagagcacgcttattcaccagggtgaaaaagcggaaacgctgtactacatcgttaaaggctctgtggcagtgctgatcaaagacgaagagggtaaagaaatgatcctctcctatctgaatcagggtgattttattggcgaactgggcctgtttgaagagggccaggaacgtagcgcatgggtacgtgcgaaaaccgcctgtgaagtggctgaaattagctacaaaaaatttcgccaattgattcaggtaaacccggacattctgatgcgtttgtctgcacagatggcgcgtcgtctgcaagtcactagtgagaaagtgggcaacctggcgttcctcgacgtgacgggccgcattgcacagactctgctgaatctggcaaaacaaccagacgctatgactcacccggacggtatgcaaatcaaaattacccgtcaggaaattggtcagattgtcggctgttctcgtgaaaccgtgggacgcattctgaagatgctggaagatcagaacctgatctccgcacacggtaaaaccatcgtcgtttacggcactcgttaatcccgtcggagtggcgcgttacctggtagcgcgccattttgtttcccccgatgtggcgcagactgatttatcaccccgatatcaactatgcacttcgacaaacgctggtgctatgtttgcccgtggccgttgggttaatgcttggcgaattacgattcggtctgctcttctccctcgttcctgcctgttgcaatattgcgggccttgatacgcctcataaacgttttttcaaacgcttaatcattggtgcgagcctgtttgccacctgtagcttgctgacacagctactactggcaaaagatgttcccctgccctttttgctgaccggattaacgctggtacttggcgtcactgctgagctggggccattgcacgcaaaattgcttcctgcaagcctgctcgccgccatttttaccctcagtttggcgggatacatgccggtctgggaaccgttgctcatctatgcgttgggcactctctggtacggattgtttaactggttttggttctggatctggcgcgaacaaccgctgcgcgagagtctaagtctgctgtaccgtgaactggcagattattgtgaagccaaatacagcctgcttacccagcacaccgaccctgaaaaagcgctgccgccgctgctggtgcgccagcaaaaagcggtcgatctaattacccagtgctatcagcaaatgcatatgctttccgcgcaaaataatactgactacaagcggatgctgcgtattttccaggaggcgctggatttacaggaacatattagcgtcagtttgcatcagccggaagaggtgcaaaagctggtcgagcgtagccatgcggaagaagttatccgctggaatgcgcaaaccgtcgccgctcgcctgcgcgtgctggctgatgacattctttaccatcgcctgccaacgcgttttacgatggaaaagcaaattggcgcactggaaaaaatcgcccgccagcatccggataatccggttgggcaattctgctactggcatttcagccgcatcgcccgcgtgctgcgcacccaaaaaccgctctatgcccgtgacttactggccgataaacagcggcgaatgccattacttccggcgctgaaaagttatctgagtctaaagtctccggcgctacgcaatgccggacgactcagtgtgatgttaagcgttgccagcctgatgggcaccgcgctgcatctgccgaagagctactggatcctgatgacggtattgctggtgacacaaaatggctatggcgcaacccgtctgaggattgtgaatcgctccgtgggaaccgtggtcgggttaatcattgcgggcgtggcgctgcactttaaaattcccgaaggttacaccctgacgttgatgctgattaccaccctcgccagctacctgatattgcgcaaaaactacggctgggcgacggtcggttttactattaccgcagtgtataccctgcaactattgtggttgaacggcgagcaatacatccttccgcgtcttatcgataccattattggttgtttaattgctttcggcggtactgtctggctgtggccgcagtggcagagcgggttattgcgtaaaaacgcccatgatgctttagaagcctatcaggaagcgattcgcttgattcttagcgaggatccgcaacctacgccactggcctggcagcgaatgcgggtaaatcaggcacataacactctgtataacagtttgaatcaggcgatgcaggaaccggcgtttaacagccattatctggcagatatgaaactgtgggtaacgcacagccagtttattgttgagcatattaatgccatgaccacgctggcgcgggaacaccgggcattgccacctgaactggcacaagagtatttacagtcttgtgaaatcgccattcagcgttgtcagcagcgactggagtatgacgaaccgggtagttctggcgatgccaatatcatggatgcgccggagatgcagccgcacgaaggcgcggcaggtacgctggagcagcatttacagcgggttattggtcatctgaacaccatgcacaccattagcagcatggcatggcgtcagcgaccgcatcacgggatttggctgagtcgcaagttgcgggatagcaaggcgtaatgcaggctaaaccatcggataaggcattcacgccgcatccgacatcttttgcctgatgcttcgtatttacgccccaaccaccttcgccaccgcgtgggcgaaacgttgcatcccttcatcgatatccgcatcttccaccaccaggctcggtgcaaaacgcatcacatccggtccggcattcagcaccattacgccagcctctgcgcccgcatacaggaaatcacgcgcccgacctttgtactgtggtttcagctctgcgccaatcaacagccccataccgcgaatatcgctaaatacatcgtactgctgatcgatcttctgcagatggtcaacaaaacgctggcgtttcgcctgaatgccttccagcacttcaggggtattgatgatatcaaacgccgcccccgctactgcacaggccagaggattaccgccgtaggtggaaccgtgagaaccaggatgaaacgcagaagcaatttccgccgtggtcagcatggcgctaatcgggaagccgccgcctaacgctttcgcagaggtcagaatatccggcgtaacgccgtagtgcatgtaagcaaacaaatcgccggtccgccccatcccgcactgcacttcatcaaacaccaataatgcctgatgttgatcgcacagctcgcgcaagccctgcaaaaactctggcgtcgctgccgtcacaccgccctcgccctggatcggctcaaccaccaccgcacaggtgtgatcatccatcaccgctttcactgcatggagatcgttaaagggaacgtggatgatgtctgccggtttcggcccaaagccgtcggaatattttggctgcccacccacgctaacggtaaacaggctgcgaccatgaaaagcgttatggaaggcaataattttggttttgaacgggctatgacgcacacaggcgtaatggcgtgccagtttaaaggcggtttcgttagcttccgtgccggagttcataaacaccacgcgttcggcaaacgttgcctcaatcagtttacgcccaagacgcagcgccggttcattggtgaaaacgttactgatatgccacagagtttcgccctgggtttttaacgcgttcaccagcgcaggatggcaatggcccaacgccgtaactgcaatgccacccgcgaaatcgacatactccttgccttgctgatcccagattcggctgccctgaccttttaccggaataaactctgccggagcataaatcggcaggatcacttcatcgaaagtcgcgcgtgtaattgctgtttgttcaattgccatctcatgatcaccctgttacgcataaacaaatgtgaaattataaccacaaaatatgcataaaaaatcactaaatggcaatcagaaatcagcgatgcaggaaattagccagcagttgatgtccttgttcgctaagaatactttctggatggaactgcacaccttccagatcccactggcgatggcgaatccccataatctctcgggtttcgctccaggccgtcacgtcaaagcacgctggtaaactgtcaggttccaccaccaggctatggtagcgtgtcacggtaagtggatttgccagcccccgaaatacgccctcaccgttatgtgtaatcgggctggttttgccgtgcatgacctttgcggcgcgcacaactttaccgccaaatgcctgcgccattgcctgatgaccgaggcagacgccaagaatcggcaagcgcccggcatagtggcgaataacgtcaagggagatcccggcttcatctggcgtacaggggccaggactgatgacaattttttgtggtttaagggcgtcgatatccgccagcgtcaacgcatcgttgcgcttaaccagcacatccgcccccagttcacaaaagtactggtagaggttccaggtaaaagaatcgtagttatctataagcaggatcatggcggctccggtacaaaagaaccgcgctattttactcagattccccggcttcgcttaccactttgctaaatatcatctgcagtgcggtgagatcccccattgccccactctgatttgcctgattccaggcctctttttcgataccctgccagctcagttgatatccggcatgaatcgccagttgctcgaagaagatccgctgtgccagaccacttcccacccggaagggatgcagcacgttgatttcacaatagtaatgcgccagccgctcgacgaacttcgctttctccaggccaaccagataaccttcttcctccagatcctgcatcagggcattgccctctttttcgatataagcaaagtggcagaacggcgtatcaccctgataaatatcaacttcacgcagttgccctgcccagtcgaaaatatcctgatacagctggcgatggatagttcgcaaatgcggtaaaccgcgcaccagcggaccaagctcaatggtcgcagcacgcagcgccgtcatttcgtaagcggcctgttccagccgctgctgctggcggatgttcagccggttacgcatgatatcaaggcctggataaagatacggatcgcgcccttcgccgaatttatcgctcatagtgactcctcagctcttcaaggcgcgctaaagcctctgcggcagtaagagtgactaaaggcatctcgacgccttcaagacggcgactggcctgaaaattacgattacgctgaagctcccagagacgggacttttgcttatcggtgagtttcttcacttgatgcctccctgaacgtgtccatttgccacaagtataagcggcaaatccgggttacgccgggagagcagaagcgcgggcaagattgcccgcgcgagaaatcattacggcaggactttagcggaaaggataactaccggtttactcggcacattctggtacggaccaacgtcatgagtcggcacctgggaaatcttatcggcaacgtccatgcctttcaccactttaccaaataccgcgtaaccgaaatcacgctgaccatggtcaaggaaggcgttatcggcaacgttgataaagaactggctggtggcgctgtctttgtcagcggtacgtgccatcgcgatggtgccacgcgtgttgcgcaggccgttatcggcttcatttttgattggcgggtttggttttttctgctgcatctgctcggtgaaaccgccgccctgaatcataaagccaggaatgacgcggtgaaaggtagtgttgttataaaaaccgctgttcacataatcgacaaagttttgcacagacactggcgctttttgtttatccagctccagttcgatgttaccagcactggttgtcaacaatacgtgcgggtcccctttcgctgccattgctgcgggagaaagagcagaaagagcgaaaacagcagccatcgccgccagggtgcttttgaacatgagatttccttaacaaacagagcagaaaaaaagcaagtgaagagattctaaatagccttcaagaacaaggccatccctttacctaattttacgtatctgaaatatatgtaacctgacgatcactttttattccgtgatcaaaatcacctcttaaaatgcaatttagcaaccgattgcaataaaacatttaaacagatcacaaaatcacctaaaatcgcccgctcgcggcatatcccgctatgccattttatttttgaacgcaggccaatcatgactaacagcaatcgcatcaagctcacatggattagctttctctcctacgcactgactggtgcgttggttattgtcaccgggatggtgatgggaaatatcgccgattatttcaatctgcctgtttccagtatgagtaataccttcaccttcctcaacgccggcattttaatctctatcttcctcaacgcctggctgatggaaatcgtcccgttgaaaacgcagttacgttttggctttctcctgatggtgctggcggttgccggtttgatgttcagccacagcctggcgctgttcagcgcggcgatgttcattctcggggtggtcagcggcatcaccatgagcattggtacattcctggtaacacaaatgtatgaagggcgtcagcgcggttcccgcctgttatttaccgactccttcttcagtatggctgggatgattttcccaatgatcgccgcgtttctactggcgcgcagcattgagtggtactgggtttatgcctgcatcgggctggtgtatgtcgctatttttattctgaccttcggctgtgagttcccggcgctgggcaaacatgcgccaaaaacggatgctccggtagagaaagaaaagtgggggatcggcgtactgtttctctctgttgcggcgttgtgctacatcctcggtcagttaggttttatctcctgggtgcctgagtatgccaaaggcctgggcatgagcctgaacgacgcgggcacgctggtgagtaacttctggatgagttacatggtcggcatgtgggcgttcagctttattcttcgcttctttgatttgcaacgcattctgaccgtactggctggtctggctgcgattctgatgtacgtctttaacaccggaacaccagcacatatggcgtggagtattctcgctctgggcttcttctccagcgcgatctataccaccatcatcaccctgggtagtcagcagaccaaagtaccgagcccaaaactggttaactttgtcctgacctgcggaaccatcggtactatgttgacctttgtggttaccggcccgatcgttgaacatagcggtccgcaggcggcactgcttacagcaaacggtctgtacgctgtcgtctttgtgatgtgcttcctgttaggtttcgtcagccgtcaccgtcagcataacaccctgacctctcattaattgctcatgccggacggcactatcgtcgtccggccttttcctctcttcccccgctacgtgcatctatttctataaacccgctcattttgtctattttttgcacaaacatgaaatatcagacaattccgtgacttaagaaaatttatacaaatcagcaatatacccattaaggagtatataaaggtgaatttgatttacatcaataagcggggttgctgaatcgttaaggtaggcggtaatagaaaagaaatcgaggcaaaaatgagcaaagtcagactcgcaattatcggtaacggtatggtcggccatcgctttatcgaagatcttcttgataaatctgatgcggccaactttgatattaccgttttctgtgaagaaccgcgcatcgcttatgaccgcgtacacctcagctcttacttctctcaccacaccgccgaagagctgagcctggtgcgcgaaggcttctacgagaaacacggcatcaaagttctggtcggcgaacgcgctatcaccatcaaccgtcaggagaaggtgattcactccagcgccggacgtaccgttttttatgacaagctgatcatggcaaccggttcctacccgtggatcccgccaatcaaaggttctgatactcaggactgctttgtctatcgcactattgaagacctcaacgccattgaatcctgcgcccgtcgcagcaaacgcggtgccgttgttggtggcggcctgttaggtctggaagccgcaggcgcgctgaaaaacttaggtattgaaacccacgttatcgaatttgcccctatgctgatggcagaacagcttgatcagatgggcggcgagcagctgcgtcgcaaaatcgaaagtatgggcgtgcgcgttcacaccagcaaaaacacccttgagattgtgcaggaaggtgttgaagcgcgtaaaaccatgcgttttgccgacggcagcgaactggaagtcgactttatcgtcttctctaccggtatccgtccgcgcgataagctggcaacccagtgtggtctggacgttgctccgcgtgggggtattgtcattaatgattcctgccagacttccgatccggatatctacgccatcggtgaatgcgcaagctggaacaaccgtgtatttggtctggtagcacctggctacaaaatggcgcaggtcgccgttgaccatattctcggtagcgaaaacgcctttgaaggtgctgaccttagcgccaagctgaaactgctgggcgtagacgtaggcggtattggtgatgcgcacggtcgcacgcctggcgcacgtagctacgtttacctcgacgaaagtaaagagatctacaaacgcctgattgtcagcgaagacaacaaaaccctgctcggtgcggtactggtgggcgataccagcgactacggtaacctgctgcaactggtgctgaacgctatcgaactgccggaaaacccggattccctgatcctgccagcacacagcggtagcggcaagccgtctatcggtgttgataaactgccggacagcgcgcaaatctgctcctgcttcgacgtcaccaaaggtgatctgattgctgccatcaacaaaggctgccacacagttgcggcgctgaaagctgaaaccaaagcgggtactggctgcggtggctgtatcccgctggtcactcaggtactgaacgcggaactggcgaaacagggcatcgaagttaacaacaacctgtgcgaacactttgcttatagccgtcaggaactgttccatttgatccgcgttgaaggcattaaaaccttcgaagaactgctggcgaaacacggcaaaggctacggttgtgaagtttgtaaaccaaccgtcggtagcctgctggcctcctgctggaacgaatacattctgaagccggaacatactccgctgcaggattctaacgacaacttcctcgctaacatccagaaagacggcacctacagcgtgatcccgcgttctccgggcggtgaaatcaccccggaagggctgatggcggtaggtcgtatcgcgcgtgaatttaatctctacaccaagatcactggctcccagcgtctggcgatgtttggcgcacagaaagacgatctgccggagatctggcgtcagctgattgaagccggcttcgaaaccggtcatgcctatgcgaaagcactgcgtatggcgaaaacctgcgtgggtagcacctggtgccgctacggcgttggcgacagcgtcggcctcggcgtggaactggaaaaccgctacaaaggcatccgtacgccgcacaaaatgaagttcggtgtctccggctgtacccgtgaatgtagtgaagctcagggtaaagacgtgggtattatcgccactgaaaaaggctggaacctgtatgtttgcggtaacggcggcatgaaaccgcgtcatgcggatctgctggcggcggatatcgatcgcgaaacgctgatcaaatatctcgaccgcttcatgatgttctacatccgtactgccgacaaactgacgcgtaccgcaccgtggttagaaaacctcgaaggcggcatcgattacctgaaagcagtgatcattgacgacaaactggggctgaacgcacatctggaagaagagatggcgcgcctgcgtgaagcggtactgtgtgagtggactgaaacggtcaatacgccgtctgcgcagactcgcttcaaacacttcatcaacagcgacaagcgtgacccgaacgtgcagatggtgccagagcgcgaacagcaccgtccggcaacgccgtatgaacgtatcccagtaactctggtggaggacaacgcatgagccagtggaaagacatctgcaaaatcgatgacatcctgcctgaaaccggcgtctgcgcgctgttaggtgacgagcaggtcgcgattttccgcccgtatcacagcgatcaggtgtttgcgatcagcaacatcgacccgttcttcgagtccagcgtgctgagtcgcggactgattgcggaacaccagggcgagctgtgggtcgccagcccgctgaaaaaacagcgttttcgcttaagcgacggcttgtgcatggaagacgaacagttttccgtcaaacattacgaagcgcgagtgaaagacggcgtggtgcagctgcgcggttaatgttttaacgggaggcgcaatgcctcccctttttgcatggtcctgtaataatcttcggtatattgcaggacattttttaaactttttgttttattttttgtttttattttttaaaggataatcaaatgtttacagacactattaataagtgtgcggctaacgctgcgcgcattgcacgcctgagcgcaaataacccgctcggcttttgggtcagctccgccatggcgggcgcgtatgtgggtcttgggatcatcctgattttcacgctcggtaatttgctcgatccatccgtacgccctttggtgatgggcgcgacctttggtatcgccttaacgctggtgattatcgccggttctgaactgttcaccggacacaccatgttcctcacctttggggtaaaagcgggcagcatcagccacgggcaaatgtgggcaatcctgccgcaaacctggctgggtaacctggtcggttccgtcttcgttgccatgctctatagctggggcggcggtagcctgctgccggtagataccagcatcgttcactccgtcgcgctggctaaaaccactgcaccggcaatggtactcttcttcaaaggtgcattgtgtaactggctggtttgcctggcaatctggatggcgctgcgcactgaaggggcggcgaaatttatcgctatctggtggtgtctgctggcatttatcgcgtccggctacgagcactctatcgctaacatgacgctgttcgcgctctcctggttcggcaaccacagcgaagcctacacgctggcgggtattggtcataacctgctgtgggtgacgctgggtaatactttaagtggtgccgtattcatgggattgggttattggtatgctacgccgaaagcgaatcgtccggttgcggacaaatttaatcaaactgaaacggctgccggttaattactaaggggtttttacgtggatcatttgcctatattttgccaattacgcgatcgcgactgtctgattgtcggcggtggtgatgtcgcggaacgcaaagcaaggttgctgttagacgcaggcgctcgcttaacggtgaatgcattagcgtttattccacagttcaccgcatgggcagatgcaggcatgttaaccctcgtcgaagggccatttgatgaaagccttctcgacacctgctggctggcgattgcagcgacggatgatgacgcgcttaaccagcgcgtcagcgaagccgctgaagctcgtcgcatcttctgtaacgtggtcgatgcgccgaaagccgccagctttattatgccgagcattattgaccgcagtccgctcatggtagcggtctcctctggcggcacctctccggttctggcacgcctgttgcgcgaaaaacttgaaagtctgctgccgttacatctgggccaggtagcgaaatacgccgggcaattacgcgggcgagtgaaacaacagttcgccacgatgggtgagcgtcgccgtttctgggagaaattgttcgttaacgaccgcctggcgcagagcctggcaaacaacgatcagaaagccattactgaaacgaccgaacagttaatcaacgaaccgctcgaccatcgcggtgaagtggtgctggttggtgcaggtccgggcgatgccgggctgctgacactgaaaggactgcaacaaattcagcaggcagatgtggtggtctacgaccgtctggtttctgacgatattatgaatctggtacgccgcgatgcggaccgtgttttcgtcggcaaacgcgcgggataccactgcgtaccccaggaagagattaaccagatcctgctgcgggaagcgcaaaaaggcaaacgcgtggtgcggctgaaaggtggcgatccgtttatttttggccgtggtggcgaagagctggaaacactgtgcaacgcgggtattccgttcagcgtggttccgggtattaccgcagcttctggttgctctgcctatagcggtattccactcacgcatcgcgattatgcccagagcgtacgcttaattaccggacacttaaaaaccggtggcgagctggactgggaaaacctggcggcagaaaaacagacgctggtgttctatatggggttgaatcaggccgcgactattcagcaaaagctgattgaacacggaatgccaggcgaaatgccggtggcaattgtcgaaaacggtacggcagtcacgcagcgcgtgattgacggtacgctcacacagctgggagaactggcgcagcaaatgaacagtccaagcctaattattattggtcgggttgttggcctgcgcgataaactgaactggttctccaaccattaatttaacccgggccagagaattctggccttcttaatgactctttttatatattcagcaaataaaacatagccccttaataaatattatctgctaatgggttatattcaccgttacagcgacttacaaaattaagtcattcgctcactgacgccaattaaatattcctgtatcgttcttaacgagcagtctgcttatattcatataatcaatgaatattaattaatatataatacatagggaatgtaaatgaacaaatttattaaagttgcactggtaggtgcagtactggctacgttaactgcatgtactggtcatattgaaaaccgtgataagaactgctcttacgactacctgctgcacccggcaatttctatttctaaaatcattggcggttgcggtcctactgcacagtaagtctctgacagaaatcggctaacaccggtttaattgcccgacgccctctggattttccgagggcgtatttgtttctatgtccttcttgcccccgcccgtaaaaatattttcactttaaattcaatttgataactacatccattagccacagcgcgatcctgtgcgaaattttgtgatcttcctccacattacataacatcatatgttgttatattcatcatgcattgtcatgttaccttttaaatgactgcaaactctcccctacaacgtattggacaagaaaaaggtatcgctatgggaagccaggaactccaacgcaagctcggattttgggccgttcttgcaatcgccgtcgggacaaccgtcggctccggtatttttgtatctgtgggtgaagtggcaaaagcagcgggcacgccgtggcttacggtgctcgcgtttgtcattggcgggttaattgtgatcccgcaaatgtgcgtctatgcggaactatccaccgcttatccggaaaatggcgcagattatgtttatctgaaaaatgccggaagccgaccgctggctttcctctccggctgggccagcttctgggccaacgatgcgccgagtttgagcattatggcgctggcgattgtcagcaatcttggctttttaacgcctatcgatccgttgctcggtaaatttatcgccgccggattaattatcgcctttatgttgctacacctgcgctccgttgaaggcggcgcagcgtttcagacgctaattaccatcgccaaaattatcccgttcactatcgtcattggccttgggatcttctggtttaaagcggagaattttgccgcccctaccaccactgcgattggcgcaacgggcagctttatggcgctgctggcggggatctctgccaccagttggagctataccggcatggcctctatctgttatatgaccggcgaaattaaaaaccccggaaaaaccatgccacgagcgctgattggttcctgtctgctggttctggtgctctacaccctgctggcgctggtgatttccggcctgatgcccttcgacaaactcgccaattctgaaacgccgatttccgacgccctgacctggatccccgcactcggcagcaccgctgggatctttgttgccatcacggcgatgatcgtcattcttggtagcctttccagctgcgtgatgtaccagccgcggctggaatacgcgatggcgaaagacaacctgttctttaaatgcttcggccatgtgcatccgaaatacaacacgccggatgtctccatcatcctgcaaggggcgctggggatcttcttcatcttcgtttccgatctcaccagcctgctgggttatttcaccctggtgatgtgtttcaaaaataccctcaccttcggctccatcatctggtgtcgtaaacgcgacgattacaaaccgctgtggcgtactccggctttcgggctgatgaccaccctcgccattgcgagtagcctcattctggtcgccagtacctttgtctgggcaccgattcccggccttatctgcgccgtcatcgttattgctactggtctgcctgcttacgccttctgggcgaagcgtagccgccagctcaacgctttgagctaatgttatctggagaaaataaaatgttggatattgataaaagcaccgtggactttctggtcaccgaaaatatggttcaggaagtggaaaaagttctcagccatgacgttccgctggtgcacgccatcgtggaagagatggtgaagcgcgacattgatcgtatttatttcgttgcctgcggaagcccactcaacgcggcgcaaacggcgaaacatctggcggatcgcttttccgatcttcaggtctacgccatttccggctgggagttctgcgataacaccccgtatcgcctcgacgatcgttgcgcagtaattggcgtttctgactacggtaaaaccgaagaggtaatcaaagcgctggagctgggccgggcctgcggcgcactcactgcggcgttcaccaaacgcgcggatagcccgattaccagcgcggcggaatttagcattgattatcaggccgactgtatctgggaaattcacctgctgctctgctacagcgtggtgctggagatgatcacccgcctcgcgccgaacgcggaaatcggcaagatcaaaaacgatctcaagcagttgccgaatgcgctcggtcatctggtacgcacctgggaagaaaaaggccgccagcttggtgaactggccagccagtggccgatgatttataccgttgctgcgggtccgctgcgtccgctgggttacaaagaaggcattgtaacgctgatggaatttacctggacgcacggctgcgtgattgagagcggagagttccgccatggcccgctggagattgtcgaaccgggcgttccgttcctgttcctgctcggcaatgatgaaagtcgccacaccaccgaacgcgccattaactttgttaaacagcgtactgacaacgtgatcgtcatcgattacgccgaaattagccaagggctgcacccgtggctggcaccgttcctgatgttcgtgccaatggagtggctctgctactacctgtctatttacaaagatcacaacccggatgaacgccgctattacggtggtctggtggaatattaatccctctcccggcccggcaacgggccggatttacgcaaggagttacccgatgaaaacaggtatgtttacctgcggccaccagcggctgcctattgaacacgcatttcgtgatgcaagcgagctgggttacgacggcatcgaaatttggggcggtcgcccgcacgcgttcgcgccggacttaaaagcgggcggcatcaaacaaatcaaggcgctggcgcagacgtatcagatgccgattatcggctatacgccagaaaccaacggctatccgtataacatgatgctgggcgatgaacatatgcgtcgcgaaagcctcgacatgatcaagctggcgatggatatggcaaaagagatgaacgcgggttatacgctgatttccgcggcccacgcgggctatctcacgccacctaatgttatctggggacggctggcagagaacctaagcgaactgtgtgagtacgcggaaaacatcggcatggatctaatcctcgaaccgttaacgccgtatgaaagcaacgtcgtgtgtaatgctaatgatgtgcttcatgcgctggcgctggtgcctagcccgcgcctgttcagcatggtcgacatttgcgcgccgtatgtccaggcggaaccggtgatgagttatttcgacaaactgggcgataaattacgtcatctgcatattgtcgacagcgacggggccagcgacacgcattacattcctggagaaggcaaaatgccgctgcgggaactgatgcgcgatattattgagcggggctatgagggttactgtacggtggagctggtgacgatgtatatgaacgagcccagactctatgcccgccaggcgctggaacgctttcgcgcgctgctgccggaggatgagagatgaaaaccctggcgacaatcggcgataactgcgtcgatatctacccgcaactgaataaagcgttttctggcggtaatgcggtcaatgtggcggtgtactgcactcgctacggcatacagccgggatgcattacctgggtgggtgacgatgactacggcacaaagctgaagcaggatctcgcccgcatgggcgtcgatatcagccatgtccatacgaaacacggcgttaccgcacaaactcaggtggaactgcacgacaatgatcgcgtttttggcgactacaccgaaggcgtgatggccgactttgccctgagtgaagaggattacgcctggctggcgcagtatgacattgtgcacgcggcaatctggggacatgcggaagacgcattcccacagctgcacgctgcgggcaaacttaccgctttcgacttctccgacaagtgggacagcccgctctggcagacactggtgccgcatctcgattttgcctttgcctccgcaccgcaagaagacgaaacgctgcgtctgaagatgaaagcgattgttgcccgtggcgcaggaacagtgattgtcacgctgggtgaaaacggcagcattgcctgggatggcgcgcagttctggcgtcaggctcctgaaccggtgacggttatcgacaccatgggtgccggagatagcttcattgccggattcctttgcggctggtctgcggggatgacattaccgcaggcgatagcgcagggaacggcgtgcgcggcgaaaaccattcagtaccacggtgcctggtaagtataacgttggcgtgagcatcttcacgccaacgtgctgttacttgccggaaaacgaccctataatccgagtaattcattctttatttcagggtcgattatgagtgctacggaccgctactctcatcaactcctctacgctaccgtccgccagcgactgctggatgatatcgcgcagggggtttaccaggccgggcaacagatccctaccgaaaacgagctttgtacacaatataacgtcagccgcattaccattcgcaaagccatcagcgacttagtggcagacggcgtactgatccgctggcagggaaaaggcacctttgtacaaagccagaaagttgaaaacgccctgcttactgtcagtggttttaccgattttggcgtcagtcaaggcaaggcgacgaaagagaaagtgatcgaacaggaacgggtcagcgccgcgccgttttgcgaaaagctgaacatccccggaaacagcgaagtgttccatctctgccgggtgatgtatctcgataaagagccgctgtttattgatagtagttggatcccgctgagccgttatcctgactttgatgagatttacgtcgaaggaagctccacctatcagttatttcaggagcgttttgacacgcgagtggtcagcgacaaaaagaccatcgatatctttgccgccacccgcccgcaggcaaaatggctgaaatgcgaactgggcgaaccgttgtttcgcatcagcaaaatcgcctttgatcagaatgacaaaccggtgcacgtctccgaactcttctgccgcgccaatcgcatcaccttaactattgataataaaagacattaaccgtaggccggataagatgcgccagcatcgcatccggcgatgctggcgcgttgaattttacatcccgtacgttcccctcaccctaaccctctccccaaaggggcgaggggaccgttcagtacggaatttagcttgacggtgctatccagcattaaatactggcaatactctcacgcaaaatccgcagcaccgtctcttcaccgctgcgattcgggttaatgcgaatcgcacaatgttcactttgtggattcgcctggcgaaacgttccggaaaggcgataaaagagcggcgggatttcatatttgctctctgcacccaccgggtaaggcaaggcaccgcgcttttgcgcctcttccagcactctggcggcaatcggctgatgaaactcgacaatcaacaccttgctctgcgcattagcaatcaccgcgcttttcacttccggcaccgcaccaccgttaagcaaagccagcaaccgttcagatacccctgcctgcaccgcgtgcatcactggcgcaaacaccagaccacgcaatacttccagcgcctgtgcgccctggatctggctaccgccggagtaaagcgtggcgcgaatacggttgataacatcagcatcgccgaccactgcaccaacaccctctggcccaaatagcttgaagcaggaaaatgtgctgacattcgcgccgcattcacagccgattcgagccaccttcatcaccgcatagttgtcatcggttaacgctggaacacctgccgcgcgcaacgttgccagcacatctgccagcacgtagctgtcctgcggctgctggcgcgtatgctgcaccagcgccgcatccggttgttgctcgtcgacgacctgcttcagtgcgctcaggtcattgaaatcaacagtaataagcgtcagccccatctgctcaataataacccgtgtcgtcgggtaaacaggcgcgtcatgcaccagaagacgctgccccggtttgagcaaagccgccagcccggcgcgaatcgcgccagtccccgcgtcctgcaccagcgccgcagcctgtgcgtgaaatgcatcagccagcacctgttccacacgctgggtaacgcgcggttgattcagtcctggcgttaagcctaaatcaccgccagtaagaaactcgctgccggggaaatggcgacaaatgctatccaccagcgcaaactgcttttgctgcgcctcaataatcgtcaggctttgcagaggaaacgtcttcataggtgccttccttaagccggaacgaacaggccaagccagtaaagaacattcagcagaataccggtgatcattactgccacgaccggtgccgccattttctgtaccggacggcccagggattcgttgaggaagtaaatggcaaccgcgatagagaatccggtataacccgccatcttaattgctgcgaaaatgctaccgaccagcagcgccacttccatcagcatattcatggcgttacggatgttatcgctcgcattacgcacgctcgggtagcgtcccagccatttgccgatgctacgaagcagcaagacttccgcgctaataaccactgcgcctaataccgctgcaaccatcggattcgggctgagatagtccaccgcataaacaaaggtaaagcccgcaactgcatacacacccgttgctaacgcggtggtggcaatcaacggcacaaaccccagtccgcgcataaattctgccagagccgcctgattaatcagcgtttggctttgttccggcgttacgcctgcggaatatgctttctccagtgtgaagatgctcacttcactgccagcaaaaatcttcatgctggcaacggcggcaatcaatgctcccacgatggcgatatagggtaagtttttgataatccgactcgtgcgttcttcaaacacgctaagcccgctggcatcaatgtcattttcatcacgatgacgcaggtcgtgagttatcgcgatccccagcagcatcaccatgccaataaagatttcgatggattcagggttaagatgtgggaaatagcgcacgactaccacacgggtcatcagtaccaccacggcggcgatcagactttgcttccagccaaactggtagaaaatcgccaccagcgggaacagtgcaaaagcactaaccaccgggctgcttaattcccccaggctacctaatacatccaccggcagcgcggtcagcagctggtttactggcaacaggcaagtaaggatcaacacgccccagatagcgccaagaccaaacgccatcaggctgtttatcgccaggacgccgaggatatcggtaggaagaaagagtaaccatgcgttgagcagcccggttttcagggtaaaagagatccccacgctggccacaaaaccaatgctcagaccaaaagcgatactccccgcctcgcgacggttcatatagccttcaatcagttgcggcaggatcgggcggatgccgtcatgaaaaacagccgcgctgcgatgcgccagaaggcttgtcatacccgtcaggcacgccaccacgataatctgaatatacagatccatagtcgtgccttttatttcagatggttaatcagcatcggaatcgcgtgttcgacgtgctcaacggaaaggccaaacgccacttttccttcagcgatcattttggcgatatgctcgtctttcgctttaatgcctggtttggcaatggtgcaacttttgttatagcctatcaccgcgatggcaatgctcaatgccgcgcccgcaccggtattacacgcgccgatgtaataatccagttgcccggatttcaccttcattgccgcttccatgtcgttgtgaatgaaaacttcaaaacagccaggagccgtcgcttcaatagtttttttaatctgctcacgctgtaagcctgcaacgccaatctttttcatgagtctgtccttattggaaaaattgagagggattttcacgtaacatcacatccacatcggcctgactgaatccactctggcgcaattgcggaataaaggtggttagtaaatagtcatagccataaccaccgttggcttttaaatgggagcggcgcgtaatatccatgctcagcatgacgcggttcagcaacccacggtcgcgtagcgcatgaagcatcgcaatacgcttttcgtccgggtagtaactgttcttgccgatggtgtcgaactgcacgtacgcgccgagatcgatcatcttcaaaatgttgtcgaggttgtctttcagatcgcagtgaccaacggtgacgcggctaagatcaaccccgtgggcttgtagcaacgccagttgctccagccccatcgtgctgaagctcgtatgcgtggagatcgggcgtccggtctggttatgcgccagcgcagcggcaataaataccttctcttccagcggcgtaatctttccttcgctggtgccgatctccgcgatgatcccggctttcagctccgtgccatcgataccctgttcaatttcatcgaccatctcctgcgccagttcctgcacgctgcgggtcgccacatgttccgggaaaaacgcgtcctggtaataaccggtacaggccaccacgttgatccccgtctcgcgcattacatcaagcataaattgcgcattgcgccccatgtaacggttggtcatctcaatcacattacgcacgccccgggtcatcaggtcgttcatctcctggcaaatgaacgcatactgatcaaggcggcagtccacgttgtttttaaagccggagagatcaatatgcagatgctcatgggcgagggtgtaacccgtcggatcaaaactcatagggtgtctcctgcaaaccggagggaggaaagaaaagagcgaccattttgtggcggtggcgcgcggaaaaattcacacacggtagcccccacatcagaaagcgtggtgcgcacaccgagctgcgtagcgatcatcccttgctgataaaccagcactggcaccacttcgcgggtatggtggctgtgaccaatggtcggatcgttgccgtgatccgccatcacgaccaggcaatcatctggctgcatcgcctcaacaagccgggcaaggttacggtcaacgacctgcaaacgttcggcataacgtgcgacgtcttctgcatgaccagcgaggtcggtttcctgaatgttggtgcaaataaacgccgtcggatgggtgttaaattcgttgagggtgatatccataatccgctggctatccaccagattttgccagctcacgccataaggattgttgacgatatctgccaccttacccaccagcacggttggcacgcctgcttcatacagtttttgtggcacctgcactttttcatcgacgccatagcccatatgcacgacctggaaaccgttgtcataagcgccagaacgcggcgcattgataccaataaagcgcccttctttgctttctgcggcatcgagaatgcgttgactgtcggttaacaggccaccaaatgtaatgacccgaccgacctgtacctgctcacgcacgatacgaccaattttgattgcgtcgtcaaaagagatcacagagagattggcggtaatgttatagacctggcctaaatccgcctcgagattatcgccaatcgcaaccgcctgattgacccacagaaattgcagatcatcgccacggcgctccacctgccagccagcggaaactaatgcctgctcaacacggtcaatcacatcgcgaaaaggcatccgcagcggcggtaacgggcgcgtgcctaaaatttcctgatgccccataaaggtatcgccaccttcatgttgcagctctgccacgccccaggttgcggaatcactcggctgcatatcgcctggcgcataacccaatgcgttgattagccccagcgtctccagcgttggtagctgcaaatgcggcaactggctcaggatgtgaccacatgtattcgctcccgcatcttgcggacgcaccagcgtgacatctttcattgcccctacgccaaagctatcaatcactaacaccacaaatcgcgccattacgcccccagagagtttccaagactgtcataacgaccgacgatttccggttcgccacgatgaataccggacaccagcaccacatcgctacgggtgacaaaaatctgcgtgcgaaaacagagcaccactgcactgcttaccggaaactcgcctgccagcggcagggtgtagtcgatactgctgtcatccacagttttgagattggtttcagtaatcttttgattttctggcgtaaacaccaacgcatgttgcgcatgaccacgacgatagtaaccgccgccgtagcagtagctgtcgccacggaaatgatgggagatttcacttaaccagagcatcgcgatacgttcaggctgatcgccctgctggtttgccggaatagtgcccgtcagcgcatgaccgggttcggcatgagtcacaccgtattgcgccagtaatggcaggctagtgcagctggtcgcactaggcgcgttcagttgctcaagtgcaataccagatttcgccagttgatcccgtgcctgtatcagcgtgtgaagattcggtgtcggcaaaacttttccgacagcctcatcccaaagcaggcaagggaaatgggtaagtccggctaaatgcagccctggcagattctggatttcggcgacaatctccggcaacaccttgagggcaaaaccgctctcctggcccggataaagaaaatcatcgtcgctataaactttaagcagcacagactggattcgcccggccttcaccgccgccgcagaaacttcccgcgctttgtcgagagtaaacacggtgatgacgtcggtgccctgttcaacggcgtcagcaacctgatgacaagggatttgtaccagatgcccctgatgcgccacaggcaaaccagcgcggcgcatgactcgcgcctctttgtaatccaccgccacaatgccgctgtagcctaatgccagcaatttttccgccagccacggattacgaccaaactgcttggtcatcagatacagttcaatgccgtaaagccgcgccgtctcaatcagccgcttaccgttttccagtatctgatccacgtcgatcacccagctgtccggggcgatcttgccctgctgccacaggcttagtgcggcggaaatcagcgccgggttctggcgtttcaatgcttctacaaacatcttgttgcctcgtttctgttccttgaattaaatattcatttttttgaatatttaggttgtgcgacgtggatttgtcgggagcttcaaacctcttcgttagcagccatccataatccataaaggttggccagcaaatagccttcttcacacgggttaacttccagtgcgaattccttcaacaacacctgatgcaattgcacaacggcttgccagtggctggattgcgccagttctgccagcaactcgttatccagcggctctatttcttcaccacggcgactgcgcatcagtgcactcgccatatgtgtcatcgccatcgttccttgctcactgcgcaccggcagatggcactctgtttccagtacgttgacgacctgcatcatgcctttgcagatgtccttatcaataacgcctgcctcgcaaagcaggttgagtctggtttccatatcagatgcctttcgtttaataactcggttcctgttccccactcactacccgttgttgatgggcgagcagggcgtgtttatctacaacggcacgcagcagttgttgcattgggtaatcatcgactcgcgtcaggaccacggcttcggtggcctgtaaaaatcgcggatcgtctgtgagcggcgtcgcctctaatcccagcatggtcagttcgttttccgccaccacgttccagatcaccgcatcgacatcgcctttaacaatgcgttgtaaactctcgtgataagagagatcgactcgttccacatcactaccgccaaaaaaaacatcggtcatgattttctgatccgcgctacggttatccagccccacgcgcttcacgtttgcggactcgcctttacggcaaatcaactggtgctcgccaacgtaggtgtgcggccccaactccagcgcgaggcataagcctttttgcgtgagataactttccgccgctagtcggctaaccaccgccatgtcatacacgccattaagcagacactccacgcgaatatccgcgccacgcatgtgcgcatagtaaaaaggaatgccatcaaactgggctttcaatccgctcgccaggccttcgtacaaacgggtatagggcaagggcattgcacataccacgttgttgatatccacatgagtcagcaatgctttgttatccatctcgaccagataactgccattgcgcccacggcgttcaatccgtatcgctccgctactttccagcgttttcaacgcggcctgcgtcaggccaacggaactacggcattcatttgccagctcatctatggttttcaatcgattaccgcacttttcacccaacaaataacgggccagcgtcgtgatgacgacgccttcttttttgataaacgttcgacgcataataaattttcagtaaattgaatatttatatcttcaggaatttgaagataaggcgcaacagcgagatgtggaaacggcgaggcacttcacattttttcggattattgcaaatgaggataaaaaaaccgggtttccccggtttcagagtgatgataaaagcaaaattgcctgatgcgctacgcttatcaggcctacatttccttgcaatatgtgcattactttgtaggccggataaggcgttcacgccgcatccggcatgaacaaagcgcaatttgccagcaatagtgaattacggcttcgccacaaaaccaatcgcttcgtacaccgcttttagcgtacgggaagcgtgcgcgctggctttttccgcgccatctttcatcacctgttgcaggaaggcttcatcgttgcggaaacggtgatagcgttcctgcaattcagtcagcataccggaaacggcatcagccacttcacctttcagatgaccatacatcttgccttcgaactgtttttccagttctgggatgctctggcccgttaccgcactaaggatatccaacaggttggaaacgcccgctttgttctgcacatcgtagcgaactaccggcggctcgtcggagtcagtgaccgcacgtttgattttcttcactacgcttttcgggtcttccagcaggccgataacgttattgcgattatcgtcagacttggacatcttcttggtcggctccagcaggctcattacgcgcgcgccagatttcggaataaacggctccggcaccttaaagatctcgccatacagcgcgttgaaacgctgggcaatatcgcggctcagttcgaggtgctgtttctggtcttcacccaccggtaccagattagtttgatacagcaggatgtccgctgccatcagcaccggatagtcaaacagaccagcgttgatgttctcggcataacgcgcagatttatctttaaactgcgtcatgcgactcagttcgccgaagtaggtatagcagttcagtgcccagcctaactgtgcatgttccggcacgtgggactgaacaaaaatggtgcttttctcaggatcgataccacaagccagatacaaggccagcgtatccagcgtcgctttacgcagcttctgtgcatcctggcgcacggtgatcgcgtgttggtcaacgatacagtaaatgcaatggtagtcatcctgcatgtttacccactgacgcagcgcacccatgtagttaccaatggtcaattcaccactgggctgtgcgccactaaaaacgatgggcttagtcatttttgctttcctgattttcgctatgcggaagccctaatgcgggcagaaggtcatttatagactgataaattacatcaggctggctgagatcgatagcctcgccgtagttatatccgtaggttaagccaacacttgggcaacctgccgcttttgccgcctgaatatcattgcgactgtcgccgacaaacagcatctgttgtggggcaattcccatccgctcagccaccagtaacagcgggtccggatgcggttttttgttttgcacatcatcaccaccaatcaccacgctgaagtatttggcgatatctaaggcttcgagcagcggcgcgacgaacggcgtcggtttgttggtgaccaggcctagcggcaggcctttagcctgcaacgcgcccaacgtatcggcaacgtgcgggaacaaaaacgtcccctcttcggcaacctcgccatagtagcgatcgaacagtttacgcagaatacgtacctgttcttctgccggaatgtcgtcatcaacgggcggtttacccattgttttacgctgagtcgcacgttcctgacgcgcccaggtcaatgcgcgctccatcagaacatctgcgccgttaccaatccaggtaataacgcgttcttcacctgcgacgggcaactccagcgcatacagcgccatatctaccgcagcagcaagaccaggagcactgtcgaccagcgtaccatcaagatcaaaagcgacgccgcgaatatcttcaaacttattcatgacttacctttgccagttcactgcgcatttcatcaatgacttttttgtagtctggctggtcgaagattgcgctaccggcgacgaacatatccgcgcccgccgcagcgatttcgccaatgttgttcaccttcacgccaccgtccacttctagtcgaatgtcaaagccagactcgtcgatacggcgacgtacttcgcgcagtttatccagtgtttgaggaatgaaagactgaccgccgaaaccagggttgacggacatcagcaggatcacatccagcttatccatcacgtaatccagatagctcagaggtgtcgccgggttaaataccagacccgctttacagccattttctttaatcagttgcagcgtgcggtcaacatgctcggaggcttctggatgaaaggtaatgatgctggcaccagcggcagcgaaatcaggcacaatgcgatcgacgggtttcaccatcaggtgtacgtcgataggggcggtaatgccatagttacgcaaggatttcagcaccattggcccaatcgtcagattgggaacatagtggttatccatgacgtcaaaatgcacgacatcagcgccagctgccagggcttttgcggtatcttcacccaggcgggcaaaatcagcgctcagaatactgggggcaatcaaatactgtttcatccgcttctccttgagaattattttttcgcgggactaacgactcctggtttgtacaaagccagcagttcgtccacctttttacgtgtgccgccgttgctgcttatactgcgtcgaactttgacgacatgcaattttgcgcgctgataccactcacgcgttaacatcgtatcgtgattggagatcagcactggaatatggcgctcaaccagaccttcggcgatctccgccagatgcgcttgttgttcaagcgtaaaactgtttgtgtgatacgccgtaaagttggcggtcgcagacagcggtgcataaggcggatcgcaatagacgacggatgcatcatctgcgcgcgccatgctatcggcgtaagactcacaatagaaaaaggcattctgcgctttttcagcgaagtgatacaactctgcttccgggaaatagggttttttgtagcggccgaacggcacgttaaactcaccgcgcagattgtaacgacacaggccgttgtaaccgtagcggttcaaatataaaaacagtaccgcccgacggaacggatcctggcttttgttgaactcttcgcggaactgatagtaaacctcggcgcaatttgtttcgggaacaaacagctcgcgtgcggcctgtacgtactcatcagtacgcatcttcacaatgttatagagactgatcaggtcgctattgatatcggcaaggatataacgagaaaagtcggtgttgagaaacacgctcccggcacctacaaaaggctcaaccagacattcgcccttgggcaaatgccgtttaatatcatcaagcaggggatacttgccccctgcccacttcaaaaaagcgcgatttttcttcatgctgactaactaattacaccttctccggctgtggagaaagctccgacagcatccagcgcttcaggcaactcccgcaacgataaaccattgcgggagataaccttgattacttcagatcggcctgtacctgacgcagcggtttcgcccacgggtttttggcctggacatctgctggcaatgtagataccgcttttttcgcctcttctttgctagcgtacacgccagaaaccaggacataccacggctgaccattacgcgtcgtttcatagacaacgtagtttttcagattctctttcttcgcccaaccgttcaggttgtcgtagttagaggaactgctcagctgcagagtgtaatggctggacggtgcgcttttcaagctaccaacattacctgcggtcttcgccccagcagcgggtgttgctgtggtttgcgccggggatgccgtctgtactggagccgtagtcgccgtctcttttggtgctggcgtagaagtcgcagccggtgccttcgtgctcgccacaggggcagctggttcagtacgcttcggcgtctgtgctaccggcttcggctccgttttcacggttgcttgcggttttttcggttcaatcaccgcctgctgacgagctgggcgcgtagtggacggacgttcagcggtttgcgttttcgccgtgtcacggcttgcattgccattgcgaacaggcgcaaccgttgcgggttcagtcggcaacgtggaattgaccgccacattgttcagctgttgctgattttgtggctgggtcagcgcattgttcaggtcaccctgcacttcaacacgttgttgaccatccgttgccaccggggtttgcccttgagtcggcgtagaagagatcggtggcagagaaacatcctgctgagtattttccgcagacgtggttcccggcgctggctgcacgccattcgcctgatcggtcgcattgccagcaagatcaatactcttctcgccagacgcggtttgatcgctggaagtggtgctgggggcttttagcgcagaaccgataccgatgatcaacagcagtagaaccagaatgccgacgcccatcatcatatactgacgagaagcgggtttactggctgcttttttgcgcttacgcggacgacgctctacgcgctcttcatccacggtttcatcttcggattcgtcaatttcttcttcgatttccggttcctcattgcgctctttttgcgcacgagtcggacggcgatcgtcagtgtcatcaagttcaatatcatcaaaattgatctgcggttcgccacgttcagtacgctcagaacgttcagaagattgacgagaacgaccagtacgacgatcgctgggatcgggtttcagctcgtcttctggtttgaattcatccatttaacaccccactaaaaggttaatgcttaccacgttgcaattaacctgaagctaatagaccgcttgataagcggcctgacctttcttgttgttacgcactttgacaatcggcaatggcgttaagaacaagctcgtggctaacgccgctgcgaacttcactcttaccaattgccaacggaagaattaagcgcatctctcccgcaaggactttcttgtcacgcagcatatgcggtaaatacgcctgcgcggacatttcgcgcggcccattgaccggtaacccagcccgcttgagcagggttataatacgctgcgtttcggcagaactaaactgcccgagacgttcgctcgtccgcgccgccatcaccatacccgcagcgaccgcttcaccatgtaaccaattgccataccccatttcagcttcaatggcatgaccaaaggtgtgtcccagattcagtaaagcacgtaacccggtttcgcgctcgtcggcggcgacaacttctgccttcagttcacaacaacggcgaatacagtacgccattgccggaccgtccagacgcaacaacgcatccagattctcttccagccagttaaaaaacgcaccgtcaagaataatgccgtatttgatgacttctgccagcccgctcgctaactcacgcgggggaagcgttttcagacagtcgagatccaccaccacactagcaggttggtagaacgcgccaatcatgtttttaccgaggggatggttgaccgcagttttgccgccaacggaggaatcgacctggctcagtaacgtcgtcgggacttgaatgaaacggacaccgcgctgataactcgccgccgcgaagccggtcagatcgcccactacgccgccgccaagcgccaccagcgtagtatcgcgaccatgcggtttttgtaacaacgccgtaaagacggtatcgagtacagccaggcttttatactgctcgccgtcagggaggataacgctatcgacgttaacacccgcctgttcaagtacgccgcggaccttatcgagatacagaggagccagggtttcgttggtgaccaacatgacctgctcgccgcttttcagcggtaagaaactagctggttcattaaacaaaccagatgcgatggtaattgggtaactacgttccccgagagtaacgacaatcctctccataacgcgacatccaccttaattactgtacccgcagacgagtgtatataaagccagaattagttgctttccagcatgtgaataatctggtttgcaaccactttagcgctttgatcatcagtacgaatggtcacgtcggcaatctcttcatacagcggattgcgttcattggccaacgcttccagaacttcacgcggcggtgtttcaacgtgcagcaacgggcgttttttatcacgctgcgtgcgtgcaagttgcttttcgatggtcgtttcaagataaacgacaacgccacgagcggaaagacggttacgcgtttcacgggatttcacagagccgccgccagtagccagcacaataccctgtttctcggtcaactcattgatgaccttttcttcgcgatcgcggaagccttcttcgccttctaaatcgaaaacccagcccacatcagctccggttcgtttctcaatctcttgatcggaatcgtaaaattccatattgagttgttgagctaactggcgcccaatagtgctttttccggcacccataggcccaaccagaaagatattgcgtttctctgccattttttcggtactactaagactattcgttaatgataaacccgcttcgctcagagagcgccgcaggacatgaactgaaacctcataagatattgcgagagtcagactgaaaattatctcaatactccagcgggtttggcaactgaataaatcacccatccctctgcatatctggtcgctgcaagcgcgctgccttgctaccaccgctctggcgataaatcaccgggtaagattagcgtaaaaaagacagcaaaatgccgcctgaatgataaatcatcatcatggaacgcaggcagcgaagagcaccaactctcaaatcggtactccttgtatgctaaatacctgcgcgcgtcaaatagatgaaacacgttcagcgtaaaaacattaccgcttttacggctgtttactcactggaaaccagtcgtggcgtgataaacaccactaactcgcgtcgttcatcttcttttccgtcatgacgaaatgattgcccgaaccagggaatgtcgccaagcaacggtacgctatcctgaccgcttttatttttacgggtaaaaatgccgcccagcgccaacgtttctccgcttttgacctcgacctgcgtttcgatctcctgcttatcaatcgccagcacttcgccatcggcctgctgtagcacctgccccggaacgttctggctgatgtgtaatttcagccggatgcgacctttttgtaacaccgtgggcgtgacctccatccccaggacggcctctttaaattccacgctcgtcgcgccactttccccgctggaaacctgatatggaatttcgctcccctgtttaatgctggcaggctgaagatgactggccagcagacgcggactggcgataatatccagctgctgtttttgttcgagcgcggaaagctcaagatccagcaagcgtccgttgatgcgcccaatgttaaaaccgacatgcgttgtcgccgtcgctacggagaggtcgctaccaagcgtggtgacttgcccaacgccaccagcgtgttgcgcatcggccagcgtccatttcacgcctaactcacgcaaacttttttcattaatggtgacaatatgcgcgctcagctcaacctgcccgaccggcagatccatttgcgctacccactgttcaagcgcgcttaacgccgttttgttatctcgtagcaaaaggcgattggtgcgtttatcgacggtcatactccctttggcactcagcagcttctcccccgctttcgccagttctcccgcgtcggcgtattgcagggttatactgcgattttccagcggcagatttgcctgcgcccgcgcctgctccgcctcctggcgggcgatattgttattctgccaggcaatggaatgcacactgagaatgttgccttcctgccgcgttatcagtccggcgcttttcactacagtttgtagtgcctgcttccagggaacatctgttagatgtaagctcaccgtaccgctgacgtctgggctcacgaccaggttcaacttctcctgttcagccagcgcctgcaacacctgagctaccggaacgtcatccaccatcagcgtcactttttgcggctttgccgcctgtacgccgggtatcagcatcaacagtagtgcggctatccattgcttcatttgtatctccttgccgttgccacaaccattgtggcggttcgcagtttgtcccggtacccagcgttagtacgtctggcgtcagctgtaaaattgtccagccgttttccagcacatcgttttgctgcacccgtcgccatttcttttgcccgtcttttattacaccgatgatgcgctcgcctcgccctaccatcccctgatagcgccactggctaagttcgctaatccggcatagatcttccggcggtttaaaagggtcacgcataccggttaaaaggcacaatgcaatacctgccaacaaccagcgtttaaccctcatgcggcgtctccagttgtagcgtgaacaaaagatcatcaccttccacgcttaagctaaaacggctcacgctgacgttgcgctctgccagccgtgtaaatgcgctcggcactgcttcccacagcgttttcaacgccaactcgcctccctgcgcggatggatgccaggaaaccagttgcgcgccggataactgaaaatccagtgggctaaagggcagcgttttttcctcgctgaagggagcggtgtctaccaggcgatacagtgcggcccactgctggtgatgacttgcccgtagtcgaattaatgcgtcgcgctcttcatggtgtgtgctactcagaaaaatgagcgtaactaacatcagcaaccagaatgcccagcaaagctggcggaggcggggacttgtggcgaaccaccagtcaaagaacatgttcatcgctaaccttccttgttaactgatactcaaattgccagcgtccctgcgcatcctgctgcgtggctccccgctgattgagatgaaaagatgcatcctggcggagactcgtttctagtgcgtttaacgcggtaatgcttgttgtcagccccttgatctccagcgttccctgctgccagcttatcgttgtcagccaggcgtgctcgggtaaaagcgccgccagtgcttccagcgcagattgccagtcgcgggtaaattgtcgctggcgctgccgttggctacgctgttcgcgtaactgctgttgctccagcaaacgtggcttcgttatctgtaagctgcgggcgagttgttgttccgcctgaagcaaaactgcgtctatgcgcgcttcggcgctgcctgtcagacgcagtattagcgttatcccgacggccagcagcagaggcgcaacgaacatcagcaaccagaaacgcagaaaagcggtccggcgttgctgtcgccagggcaaaaaattaattggcgggttcatcagtacgccttcccaagcgccagccccagcgcgatggcaaagtctccacctggcggcggtagcggcggctgacgaacagaaacggcctcccagggatcaaatccgccttcgccacatatcgcgacgctttcgggatcaacggataacgctgccgccagctccttcgcgctagtcatccccaccgccagtttgcgcccccagctatagcgcgtcgcccacagccactgttcgttatcacgccaggccagacattgctgatgagaaggtaaaaaaggcaggaatcgctgtaatgcactggcatccggggtgatcgcgctcacatgaacacgcaacctttctgccagagtaagcagcgttgccagctctttgctttgcgcggcagtcacgttataggcgggactgagactgtcttcgctgtaatcgaagcgcagggagtccggatccatatccagctcgcgggccatcgtcccactcagccaggccgtttgctcccgctcaccaagggacatgctcgggcgcggaaaactccgctgtaatgtgcgactggcgggaaacgccaacataatgtgatgacgctgcggcagttcgcgactccacggtaacaacgttttagccagctgctgcgcatcaacaatccgcccatctttgataatgtcgttctccagcggcaaccgccaccagcgttgcaaaaagcattcttttgcgccccgcacgatcgcaaccgctaccgcttcttgctgttgtaaatgcaaaccaatttgccagatcttaaatgccattgtgatgatctccttatcacccgtcactctgacgggtatatcaatgcgtctggcttgcctttatactaccgcgcgtttgtttataaactgcccaaatgaaactaaatgggaaatttccagtgaagttcgtaaagtattttttgatccttgcagtctgttgcattctgctgggagcaggcagcatttatggcctataccgctacatcgagccacaactgccggatgtggcgacattaaaagatgttcgcctgcaaattccgatgcagatttacagcgccgatggcgagctgattgctcaatacggtgagaaacgtcgtattccggttacgttggatcaaatcccaccggagatggtgaaagcctttatcgcgacagaagacagccgcttctacgagcatcacggcgttgacccggtggggatcttccgtgcagcaagcgtggcgctgttctccggtcacgcgagtcaaggggcaagtaccattacccagcagctggcgagaaacttcttcctcagtccagaacgcacgctgatgcgtaagattaaggaagtcttcctcgcgattcgcattgaacagctgctgacgaaagacgagatcctcgagctttatctgaacaagatttaccttggttaccgcgcctatggtgtcggtgctgcggcacaagtctatttcggaaaaacggtcgaccaactgacgctgaacgaaatggcggtgatagccgggctgccgaaagcgccttccaccttcaacccgctctacagcatggatcgtgccgtcgcgcggcgtaacgtcgtgctgagccggatgctggatgaagggtatatcacccaacaacagttcgatcagacacgcactgaggcgattaacgctaactatcacgcgccggagattgctttctctgcgccgtacctgagcgaaatggtgcgccaggagatgtataaccgttatggcgaaagtgcctatgaagacggttatcgcatttacaccaccatcacccgcaaagtgcagcaggccgcgcagcaggcggtacgtaataacgtgctggactacgacatgcgccacggctatcgcggcccggcaaatgtgctgtggaaagtgggcgagagcgcgtgggataacaacaagattaccgatacgctgaaggcgctgccaacctatggtccgctgctgcctgccgcagtcaccagcgccaatcctcagcaagcgacggcgatgctggcggacgggagcaccgtcgcattgagtatggaaggcgttcgctgggcgcgtccttaccgtagcgatactcagcaaggaccgacgccgcgtaaagtgaccgatgttctgcaaacgggtcagcaaatctgggttcgtcaggttggcgatgcatggtggctggcacaagtgccggaagtgaacagcgcgctggtgagcatcaatccgcaaaacggtgccgttatggcgctggtcggtggctttgatttcaatcagagcaagtttaaccgcgccacccaggcactgcgtcaggtgggttccaacatcaaaccgttcctctacaccgcggcgatggataaaggtctgacgctggcaagtatgttgaacgatgtgccaatttctcgctgggatgcaagtgccggttctgactggcagccgaagaacagtccaccgcagtatgctggtccaattcgcttacgtcaggggctgggtcagagcaaaaacgtggtgatggtacgcgcaatgcgggcgatgggcgtcgactacgctgcagaatatctgcaacgcttcggcttcccggcacaaaacattgtccacaccgaaagcctggcgctgggtagtgcgtccttcaccccaatgcaggtggcgcgcggctacgcggtcatggcgaacggcggcttcctggtggacccgtggtttatcagcaaaattgaaaacgatcagggcggcgtgattttcgaagcgaaaccgaaagtagcctgcccggaatgcgatattccggtgatttacggtgatacgcagaaaagcaacgtgctggaaaataacgatgttgaagatgtcgctatctcccgcgagcagcagaatgtttctgtaccaatgccgcagctggagcaggcaaatcaggcgttagtggcgaagactggcgcgcaggagtacgcaccgcacgtcatcaacactccgctggcattcctgattaagagtgctttgaacaccaatatctttggtgagccaggctggcagggtactggctggcgtgcaggtcgtgatttgcagcgtcgcgatatcggcgggaaaaccgggaccactaacagtagcaaagatgcgtggttcagcggttacggtccgggcgttgtgaccagcgtctggattggctttgatgatcaccgtcgtaatctcggtcatacaacggcttccggagcgattaaagatcagatcagtggttacgaaggcggtgccaagagtgcccagcctgcatgggacgcttatatgaaagccgttcttgaaggtgtgccggagcagccgctgacgccgccaccgggtattgtgacggtgaatatcgatcgcagcaccgggcagttagctaatggtggcaacagccgcgaagagtatttcatcgaaggtacgcagccgacacaacaggcagtgcacgaggtgggaacgaccattatcgataatggcgaggcacaggaattgttctgattaaaaaggcgcttcggcgccttttcagtttgctgacaaagtgcacttgtttatgccggatacggcgtgaacgcgttatccggctaacaaaatcgtgaaaactcaataaattgcagaaaccccataagcctgataaacattgtgcatcaggcaaacttcacgcatttacactcgcccctgccctttcaaccattcgcgcacgaggaacagcgcactgacattgcgcgcttcattgaagtcagggtcttccagccaatccatcatatgcgccagcggccagcgcacctgtggtagcggctctggctcatcgccttccagactttccgggtagagatcttgcgctaccacgatattcattttgctggaaaagtaagacggtgccatgctgagcttcttcaaaaaagtcagatcgttcgctccaaatccaacctcttcttttagctcgcggttagcggcttcgtagacgctttcacccggatcaattaatcctttgctaaaacctaattcgtaggattcagttcccactgcgtattcgcggatcaggatcaggtgatcgtccacaatcggcacaatcatcactgcttcccggttggttggacgcattcgttcataaacacgccgcacgccattgctgaactccagatccacgctctcgacggtaaacagtcgggaacgggctacagtttcaacattcagaatggtgggtttttgtaaacttttgctcatcgtgggatctatgctgtgaaatcagcggttattgtgcgatatcggacacgctttcggcaatgtgaattgcatgttatttacatttatgtaacttaataaataatcgtcctcaaatcaaattaaaagtcaataggttgaaataactccaggaatttgctgatattccgccttcagagggtttgctatgatcagcggttactgtgatgtgcttaatgatgctcaagttaaactccacgcttgccgatagccaaccgcagaatcatgtattgtgtccggtgcgactgaccacgcctgacagactaagtaagatggggaaagcatgagcaccattgtgatttttttagctgctttgctggcctgcagtctacttgcgggatggctgataaaagtgcgatccagacggcgtcagctgccctggaccaacgccttcgcggatgcgcaaacgcgtaaactcacacctgaagaacgtagcgccgttgaaaattatcttgagagcctgacgcaggtattacaggtgcctggcccaacgggagccagcgcggcaccgatctctctggcgctgaatgccgaaagcaacaacgtcatgatgctgacacacgctatcacgcgttacggcatctctaccgacgatccgaataaatggcgttactacctcgatagcgtagaagtccacctgccccctttctgggaacagtacatcaacgatgagaataccgttgaactgattcataccgatagcctgccgctggttattagtctcaacggtcatacgctgcaggagtacatgcaggaaactcgcagctatgccttgcaacctgttccgagtacgcaggcgagcattcgcggggaagagagtgagcaaatcgagctactcaatattcgcaaagaaacgcatgaagaatatgcgctgagtcgtccgcgcgggctgcgtgaagcgttgctgatcgtcgcctccttcctgatgttctttttctgcctgattaccccggatgtatttgttccgtggctggcaggcggcgcgttactgctgctgggcgcaggtctgtgggggctattcgcgcccccggcaaaatcctccctgcgggaaattcattgtctgcgcggtacaccccgtcgttggggattgtttggcgaaaacgatcaggaacagatcaacaatattagtctcggtattatcgacctggtctatcccgcacactggcagccatacattgctcaggatctcggtcaacaaaccgatatcgatatctatctcgaccgccatgtagtgcgtcagggacgatatcttagcctgcatgatgaagtaaaaaactttccgttacagcactggctgcgcagtacgattatcgctgcgggcagcctgctggtgctgtttatgctgttattctggatcccgctggatatgccgctgaaattcactctcagttggatgaaaggcgcgcagaccattgaagccaccagcgtaaaacaactggctgacgctggcgtgcgggtaggcgatacattgcgtattagcggtacgggaatgtgtaatattcgaacttccggaacctggagcgcgaaaaccaatagtccttttttaccgtttgactgcagccagatcatctggaacgacgcccgcagtttgccattaccagaatctgaactggtcaacaaagcgacggcattgactgaagcagttaatcgccagctgcaccctaaaccggaagatgaatctcgcgtcagtgccagtttacgtagtgcaattcaaaaatccggcatggtattgcttgatgattttggcgacattgtactgaagacagcggatttatgttctgccaaagatgactgtgtgcgactgaaaaatgcgctggtcaatctcggcaacagtaaagactgggacgcgctggtaaaacgcgccaacgccgggaagctcgatggcgtgaatgtgttattacgcccggtgagtgcggaaagcctggataacctggtggcaacctccaccgcgccgtttatcacgcatgaaacggcgcgagcggcacaaagtctaaacagtccggcccccggcggattcctgattgtcagcgacgaaggcagcgattttgttgatcagccctggcctagcgcaagtctttacgactacccgccgcaagaacagtggaacgctttccagaaactggcacaaatgctgatgcatacgccgtttaacgccgagggtatcgtcacaaaaatcttcactgacgccaatggtacgcagcatattggccttcatccgatcccggatcgttccggcctgtggcgctatctcagcaccacattgctgctactgacgatgctgggtagcgccatttacaatggcgtacaggcctggcgtcgttaccagcgtcatcgcactcgcatgatggagattcaggcctattatgaaagctgcctgaacccgcaactgatcacccctagtgaaagccttatcgaataacacgtttgcgcggcaggttatgctaccctgtcgcgcaaattgcttcactctggagatttccctcatgcatatcaacattgcctggcaggacgtagataccgttctgctggatatggacggcacgttgctcgacctcgccttcgataactatttctggcaaaagctggtgcctgaaacatggggcgcgaaaaacggggttacgccacaggaagcgatggaatatatgcgccagcaatatcacgacgtacagcatacgctaaactggtactgtcttgattactggagtgagcaactgggtctggatatctgtgcgatgaccaccgagatgggaccgcgtgccgtactgcgtgaagataccattccgtttcttgaggcactgaaagccagcggtaagcagcgaattttgctcaccaatgcgcatccgcacaacctggcggtaaaacttgagcataccggtctggacgcacaccttgatttattactttccacccacacatttggttatccgaaagaggatcagcggttatggcatgcggtggccgaagctacgggtctgaaagctgaaagaacgctgtttattgatgacagcgaagcgattctcgatgctgccgcgcaatttggtattcgttactgcctcggcgtgactaatcctgattccgggattgccgagaaacagtatcaacgccatccgagtctgaatgactaccgccgcctgatccccagcctaatgtgaaggagacgccatgaaagagaaacctgctgttgaggttcgactggataaatggctatgggctgcccgtttttataaaacccgcgcgctggcccgtgaaatgattgaaggcggtaaggtgcattacaacgggcagcgcagcaagccgagcaaaatcgtcgagctgaatgccacgctcactctgcgccagggaaatgacgaacgcacggtgattgtaaaggcgattactgaacagcgtcgccccgccagcgaggcagccttgctgtatgaagagactgcggaaagtgtagagaaacgcgaaaaaatggcgctggcacgtaaacttaatgccttaaccatgccgcacccggaccgacgcccggacaaaaaagagcgccgcgacctgttacgatttaaacacggcgacagtgaataactgtcacctgcaagagagatgattatgccgcaacatgaccaattacatcgctatctgtttgaaaactttgccgtgcgcggcgaactggtaaccgttagcgaaaccctgcaacagatccttgagaaccacgattatccgcagcccgttaaaaacgtgctggcagaactgctggttgcgaccagcctgttaaccgctacgctgaagtttgatggtgatatcaccgtacagctgcagggcgacggtccgatgaatctggcggttattaacggtaacaataaccagcagatgcgcggtgtggcgcgcgtgcagggcgaaattccagaaaatgccgacctgaaaacgctggtcggcaatggttacgtggtgatcaccattaccccgagcgaaggcgaacgctatcagggcgtagttggtctggaaggtgataccctggcggcctgcctggaagattactttatgcgttctgaacagctgccgacgcgcctgtttattcgcaccggcgacgtagacggcaaaccggctgcaggcggtatgttgttgcaggtaatgcctgcgcaaaatgcccagcaggacgactttgaccacctggcgacgctaaccgaaaccatcaaaaccgaagaactgctgaccttaccggcaaacgaagtgttgtggcgtttgtatcacgaagaagaggtgacggtttacgatccgcaggatgtggagttcaaatgcacctgcagccgtgaacgttgcgccgatgcgctgaaaacgctgcctgatgaagaagttgatagcatcctggcggaagatggcgaaattgacatgcattgtgattactgcggtaaccactatctgttcaatgcgatggatattgctgaaatccgcaacaacgcgtctccggcagatccgcaagttcattaatgagtatgtccggcagagagggctctgccggattttacgactaatacacctgatgcgctttgtcactcattcagattcacattcagcctttcaccatccactacaagatcgcgccacgctttaggcttcgtccccagttttccatccttcgcagctgtgagtaatttttctttcgttatttcgttcggaagtaaactcatatcaagcgcgtcccattcttttctgtcactgtcaaagccatagacaatgactctgtcatcattaaaagcaaacaggatccgctccgcctgaccatcactattcagatcttgctcgaccaggacgcaggcgtctttttcaatacaggtcatcacgttatagcgatcctggattaaggcgctccagaatgtcgcatcaggtttaacagaaccaggggcaattaacacattatcggctaatactttttcgcttacctgttgctgaagatgttgctctccatctaacgccatcagcagatcccgcgcgcgtttcgggtctttcataaacccggcatcgcttttcaggctctcaagcgcagcacgtccatagcgaccgctctgctcgagcatgtagatagttacctggtcactcgtgtttttgccgctctgataacgcgccatatggctgttcacgctaatgcgcatactgtccagcaccgggctattaagaagcaccagtatcaccaacaccaataagctaaccgcaaggttcactttgccctgaagaacaacgggattttgccctttacgccagacgatgctgacaaaataccccaggctccacaccagtaacaccagcaccgccagcacgccctgcaagcggtcgacagtccagccgtactgagcgacccgcagccataacgcccaggcggcgacgaacacatacagcggagcaaccagcaaagcggttttaatcaggcaacgcaacggccctgtccagggaagactcgctttttgcggatcgcggacaatagccattaagatcaattgcaaaaaggccagcgtcaacagcaacccggcggcggagatgtggcgagaaatcgcgctcaggcccgtaaacggcagggtgatgataaacatcagggttagcaaacttactaacggcagcaaccccgtggcgattaacgtgaacaacttttgaatagagtcgattaaacgactctgtgttcgcgcgaggatcaccgccagcgcggtaaccagacctaacgtgagataaataaaccagtcggttgcaaaaaagagcgtattgaaaaacgtgatgccaacaagtttaaacaactcactccacagtaaaagcaccagccacgtcaagccattggcgagaaaaatcaccagtaatataagtacgttatgccatacactctggtaaaaatagcgatagcggctactgtcattgcggatgcgaaggctttgttgtatccacggtagcaacaacattgccatcaacagcagatagcaaccaaaatcccaaagcgccttttcagctctccaggggttcatgccatcagtttgccacttcagccagccgctcatccccagcgtggcaataaacactagcgccagccatccccaaaggcgcttctgtttaaaagagatcacggagaagagtaaaacggaactaaacgcgacggtcgcaggcacgccataaacaatccaactgtgattttttccggaaagccaggcgatcagcaggtagcaaaccagaccctgaagtaatccggtagcaatcatcccccagcgtgttgcgggactaagttcaacgttatccatgttggttatccagaatcaaaaggtgggttaattatcgcatccgggcagtagtattttgcttttttcagaaaataatcaaaaaaagttagcgtggtgaatcgatactttaccggttgaatttgcatcaatttcattcaggaatgcgattccactcacaatattcccgccatataaaccaagatttaaccttttgagaacattttccacacctaaaatgctatttctgcgataatagcaaccgtttcgtgacaggaatcacggagttttttgtcaaatatgaatttctccagatacgtaaatctatgagccttgtcgcggttaacacccccaaaaagactttactattcaggcaatacatattggctaaggagcagtgaaatgcgcgttaacaatggtttgaccccgcaagaactcgaggcttatggtatcagtgacgtacatgatatcgtttacaacccaagctacgacctgctgtatcaggaagagctcgatccgagcctgacaggttatgagcgcggggtgttaactaatctgggtgccgttgccgtcgataccgggatcttcaccggtcgtagtccaaaagataagtatatcgtccgtgacgataccactcgcgatactttctggtgggcagacaaaggcaaaggtaagaacgacaacaaacctctctctccggaaacctggcagcatctgaaaggcctggtgaccaggcagctttccggcaaacgtctgttcgttgtcgacgctttctgtggtgcgaacccggatactcgtctttccgtccgtttcatcaccgaagtggcctggcaggcgcattttgtcaaaaacatgtttattcgcccgagcgatgaagaactggcaggtttcaaaccagactttatcgttatgaacggcgcgaagtgcactaacccgcagtggaaagaacagggtctcaactccgaaaacttcgtggcgtttaacctgaccgagcgcatgcagctgattggcggcacctggtacggcggcgaaatgaagaaagggatgttcagcatgatgaactacctgctgccgctgaaaggtatcgcttctatgcactgctccgccaacgttggtgagaaaggcgatgttgcggtgttcttcggcctttccggcaccggtaaaaccaccctttccaccgacccgaaacgtcgcctgattggcgatgacgaacacggctgggacgatgacggcgtgtttaacttcgaaggcggctgctacgcaaaaactatcaagctgagcaaagaagcggaacctgaaatctacaacgctatccgtcgtgatgcgttgctggaaaacgtcaccgtgcgtgaagatggcactatcgactttgatgatggtagtaaaaccgagaacacccgcgtttcttatccgatctatcacatcgataacattgttaagccggtttccaaagcgggccacgcgactaaggttatcttcctgactgctgatgctttcggcgtgttgccgccggtttctcgcctgactgccgatcaaacccagtatcacttcctctctggcttcaccgccaaactggccggtactgagcgtggcatcaccgaaccgacgccaaccttctccgcttgcttcggcgcggcattcctgagcctgcacccgactcagtacgcagaagtgctggtgaaacgtatgcaggcggcgggcgcgcaggcttatctggttaacactggctggaacggcactggcaaacgtatcagcattaaagatacccgcgccattatcgacgccatcctcaacggtagcctggataatgcagaaaccttcactctgccgatgtttaacctggcgatcccaaccgaactgccgggcgtagacacgaagattctcgatccgcgtaacacctacgcttctccggaacagtggcaggaaaaagccgaaaccctggcgaaactgtttatcgacaacttcgataaatacaccgacacccctgcgggtgccgcgctggtagcggctggtccgaaactgtaatgatttgaagctggagaatatctatccagtatcttatagaaagcaaaacgggaggcaccttcgcctcccgtttatttacccttcttttgtcgtgccctgcgcccgcgttaccggcactggcagccaggcgcgaatggaaagcccgccccgctcgctggtgccaagctccagcatcccgttatggttatccacgatacgctgcacaattgccagccctaatcccgtgccgctaatggtgcgcgcactgtcgccgcggacaaacggctggaacaggtgcttacgttgttccggcgcaattcccggaccgtcatcttccacctggaaccaggcgcgattcggctccgttccgctgctgactttgatccagccattgccataacgggcggcgttgaccaccatattcgccaccgcgcgtttgatgctcagcgggtgcattttcacttcaatgctgccggggtaaagcgcggtttcaatttcccgctcatagccactttcggcagcaatcacctcaccgagtactgcattaagatccgccatttccatcggcatctcctgcccggtgcgcaggtagtcgataaactgctcaatgatggcgttgcactcttcgatatctttattgatgctttctgccagatagccatcctgctcgctcatcatctcagtcgccaggcgaatacgcgtcagcggcgtgcgcaagtcgtgacttacccccgccatcagcagcgtgcggtcatccgccagttgcttaacaccagccgccatatggttaaaggcacgggtaacggaacgcacctcgctagcgccatactcacgcagcggcggcggaataatccctttaccaacctgcaaggctgcgtgttcgagatcgaccaacggtcggttctggatacgaataaacagccacgccccgcctatcgccaatagcataatcgccagcgtatagcggaacagcggagagaaatcgccctgatgaatttcggtcagcggcacgcgtacccagatattggggctcagccaggttttcagccagacgacagggctacttttgttgacctcaacgcgcacttccgtcgggccgcccagttgctgcgccatctgatggcttaagaattcatagtgttgcgcccaacgcagacctgcctcttcggcagcctcgttggagtagagagagatccccagctcacggtagatctcccgacggaaagcgggaggcacaaccaactgcgtgccgtcctccagttgcagtttgtcggtcatcaacatacgcacttcgtacgcgaggactttattaaactgctggaggctcggcaaaatcgcgaagttcagcaccaccagataagtcgtcaccaggctggcgaacagcaaggtgacgatgagcaataacgtacgggcaaaactacttcgtgggctgaagcgcaatcgcctcatgctttagagccgtccggtacaaagacgtagcccagaccccagacggtctgaatgtaacgcggatgcgctggatcttcttccaccatgcggcgcagacggctaatctgcacgtcgatggagcgttccattgcggaatattcacgaccacgggcaaggttcatcagcttatcgcgggagagcggctcacgcggatggctgaccagtgccttcagtaccgcaaactcaccgctggtgagcggcatcggctcgtcttcgcggaacatttcgcgcgtaccgaggttaagtttgaacttaccgaaagcaattaccgcctcttcctgactcggtgcgcctggcagttcgttcgcctgacgacgcagcaccgcacggatacgggccagcagttcacgcgggttaaacggttttggaatgtagtcgtcagcgccaatctccaggcctacgatacggtccacttcttcccctttcgccgtcaccataatgatcggcatcgggttgctctgactacgaagacgtcggcaaatgctcaagccatcttcaccaggtaacattaaatccagtaccataagatggaaagattcacgagtcagcaggcgatccatctgttctgcattagcgacgcttcgaacctggaagccttgttcggtgagataacgttccagcagcgcacgcaggcgcatgtcgtcatcgaccaccagaatcttgtagttctcttgcattgtttgtactcccaaaggttcgcaacaatttgtaagcgtgtattcttaaaaaagctcacgttcgtcaccagctaaatctggtatgaatttcagcctaaattgttacaaagcatattaaacagcagcttaagtatacaatttattcggcgaaacattattgattctgttgatatgatcacgttatacccaatgtgcgcattatcaaacagacaaagggaatcaacgagatgaaaacgcccctggttacccgggaagggtatgaaaaactcaaacaagagcttaattatctctggcgtgaagaacgcccggaggtcacaaaaaaggtgacctgggccgcaagtctgggcgaccgcagcgaaaatgctgactatcagtataataaaaagcgtctgcgtgaaatcgaccgtcgcgtgcgctatctcactaaatgcctggaaaatctcaaaatcgtcgattactcccctcagcaggaaggcaaagtcttttttggcgcgtgggtggagattgaaaacgacgatggcgtgactcaccgtttccgtattgtcggctacgatgaaatttttggccgtaaagattacatctctatcgattccccgatggcccgcgcattgctgaaaaaagaagtcggcgatctggcggtggtgaatacccctgccggggaagcgagctggtatgttaatgctatcgagtacgtgaaaccgtaaggaagagtcttaacctcctgccgatggctggcatttttgccagccagtccgtataactatcccctgatttttgatccgaaaagatgaactcaaaccatgatgaatgatagcttctgccgcattattgcgggtgaaattcaggcgcgcccggaacaggttgacgctgccgttcgcctgcttgacgaagggaataccgtgccgtttatcgcacgttatcgtaaggaaatcaccggcggtctggatgacacgcagctgcgtaatctggaaacgcgtctgagctatctgcgcgagctggaagagagacgtcaggcgatcctcaagtccatttccgagcaaggcaaactcaccgatgatctggcgaaggccatcaacgccaccctaagcaaaaccgaactcgaagacctctacctgccctacaaacctaaacgccgcacccgcgggcaaatcgccattgaagcagggcttgagccgttggctgacctgctgtggagcgatccgagtcacacgccagaagtcgccgctgcacaatatgtttatgccgataaaggcgtggcagataccaaagccgcgctggatggcgcgcgctatatcctgatggaacggtttgccgaagatgccgcgctgctggcgaaagtgcgtgattatctgtggaagaacgcgcatttggtttctacggtggtgagcggtaaagaagaggaaggggcgaaattccgcgactatttcgatcatcacgaaccgttgtccacggtgccttctcaccgcgcgctggcgatgttccgtgggcgtaacgaaggcgtacttcagcttagcctgaatgccgatccacagttcgatgagccgcccaaagagagctattgcgagcaaatcatcatggatcaccttggcctgcgcctgaacaatgccccggcggatagctggcgcaaaggcgtggtgagctggacgtggcgcatcaaggtgctgatgcatctggaaaccgaactgatgggcaccgtgcgcgaacgtgcggaagatgaagcaatcaacgtctttgcccgtaacctgcacgatctgctgatggcggcccctgccggactgcgtgcaacgatgggcctcgatccgggtctgcgtactggggtaaaagtggcggtggtcgatgccactggcaaactggtggcgaccgacaccatttacccgcacaccggacaggccgcaaaagcagcgatgaccgttgctgcgctgtgtgaaaaacataacgttgaactggtagcgatcggtaacggtacagcttcccgcgaaactgagcgtttctatctcgatgtgcagaagcagttcccgaaagtgaccgcgcagaaagtaatcgtcagcgaagcaggcgcgagcgtttacagcgcttccgagctggctgcacaggagttcccggatctcgacgttagcctgcgtggcgcggtgtctatcgcccgccgtttgcaggatccgctggcggagctggtgaaaatcgatccgaaatctatcggcgtaggtcagtatcagcatgacgtcagccagacgcaactggcccgcaaactggacgcagtagtagaagactgcgtaaacgccgttggcgtcgatctcaacactgcttctgttccgctgttaacccgcgtggcgggcctgacgcgcatgatggcgcaaaacatcgttgcctggcgcgatgagaacggtcagttccagaaccgtcagcaactgttaaaagtgagccgtctggggccgaaagccttcgagcagtgcgcgggcttcttgcgcattaaccacggtgataacccgctggacgcgtctaccgttcacccggaagcctatccggtggtggaacgcattctggcagcaacacagcaggcactgaaagatctgatgggtaacagcagcgaactgcgtaacctgaaagcgtctgactttactgatgagaaattcggtgtgccgacggtaaccgacatcatcaaagagctggaaaaaccgggtcgcgatccgcgtccggaatttaaaaccgctcagtttgccgatggcgtcgagacaatgaacgacctgcaaccgggtatgatcctcgaaggcgcagtgaccaacgtcaccaactttggcgcgtttgtcgatattggcgtgcatcaggacggcctggttcacatctctagtttgagcaacaagtttgtggaagatccgcataccgtggtgaaagcgggcgacattgtgaaggtgaaagtgctggaagtggatcttcagcgtaaacgtatcgccctgactatgcgcctggatgagcagcctggcgaaaccaacgctcgtcgcggcggcggtaatgaacgcccgcaaaacaaccgcccggcagccaaaccacgcggtcgtgaagcgcagcctgccggtaatagcgcgatgatggatgcgctggcggcggcaatgggcaaaaaacgttaaacgcccgtactggcctacggttcgaatttgcacgaaatcgtagggcagataaggcgttcacgccgcatctggcaacgaacgccttgcctgacataaaagtgccggagaatatctccggcatttttattccacagccaaactcataatatattccggcaatatttatcatttcattaacaactgaaaccttaattaaacattagccagtccgggtaattcactattcgaattatattttcgctgcgatataaccttgagccacatcaacattgagtcagattattattcaaaccaacattcgcacacattttaagtattgctgatagaaaccattctcattatcattgtgttgttgattatttaatctctcctttgttggcaaatcatctggtctcatgtcgctgtcaaacgccccatgaggtagttatccagttaatgagaaacaagtaggcacctatgcaatacactccagatactgcgtggaaaatcactggcttttcccgtgaaatcagcccggcatatcgccaaaaactgctttctcttggcatgttacctggctcctcttttaatgtggtgcgcgtcgctccactcggcgaccccattcatatcgaaacccgtcgtgtgagcctggtattacgcaaaaaagatctggccttattagaagtggaagcggtttcctgttaatacggtgataacaacaatgaaaaaattaaccattggcttaattggtaatccaaattctggcaagacaacgttatttaaccagctcactggcagtcgtcagcgtgtaggtaactgggctggcgttaccgtcgaacgtaaagaagggcaattctccaccaccgatcatcaggtcacgctggtggacctgcccggcacctattctctgaccaccatcagtagccagaccagcctcgatgagcaaatcgcctgtcactacattttgagtggcgacgccgacctgctgattaacgtggtggatgcgtctaaccttgagcgtaacctgtacctgacgctacaactgctggaactcggcattccctgcattgtggcactgaacatgctcgacattgccgagaagcaaaatattcgtattgaaattgatgctctgagcgcgcgtctgggctgtccggtgatcccgctggttagtacccgtggtcgcggtattgaagcgctcaagctggcgattgatcgctataaagctaacgagaatgtggaactggtgcattacgcacagccgctgctcaacgaagcagatagtctggcaaaagtgatgccttccgacatcccgctgaaacaacgtcgctggctgggcctgcaaatgctggaaggcgatatctacagccgcgcctacgccggtgaagcgagccagcatctggatgccgccctcgcccgtctgcgtaatgagatggacgatccggcgctgcacattgccgatgcgcgttaccagtgcattgctgccatctgtgatgtggtaagcaacaccctgacggcagaacccagccgtttcaccactgcggtagataaaatcgtgctcaaccgtttcctcggtctgccgattttcctctttgtgatgtacctgatgttcctgctggctatcaacatcggcggggcgttacagccgctgtttgacgtcggctccgtggcgctatttgtgcatggtattcaatggattggctacacgctccacttcccggactggctgactatcttcctcgcccagggcctgggtggcggcattaacaccgtgctgccactggtgccgcagattggcatgatgtacctgttcctctccttccttgaggactccgggtatatggcgcgtgcggcgtttgtgatggaccgtctgatgcaggcgctgggcttgccggggaaatcctttgtgccgctgatcgtcggtttcggttgtaacgtaccgagcgtaatgggtgcacgtacgcttgatgcaccgcgtgaacgtctgatgaccatcatgatggcaccgtttatgtcctgcggcgcgcgtctggctatcttcgcagtattcgcggctgccttcttcgggcagaacggtgcgctggcggtcttcagcctgtatatgctgggtattgtgatggcggtgctgactggcctgatgctcaagtacaccatcatgcgcggtgaagcgacgccgtttgtcatggagttgccggtctatcatgtaccacacgttaaaagcctgattatccagacctggcagcgtctgaaaggcttcgttctgcgtgctggtaaagtgatcatcatcgtcagcattttcctgagcgctttcaacagcttcagcctgagcgggaaaatcgtcgataacatcaacgacagcgcgctggcgtccgtcagccgggtgatcaccccggtcttcaagccaattggcgtgcatgaagataactggcaggcaacggttggcctgtttacaggtgccatggcgaaagaagtggtagtgggtacgctcaacaccctctacaccgcagaaaatattcaggacgaagagttcaatccggcagaatttaacctcggtgaagagctgttcagtgcgatagatgaaacctggcagagcctgaaagacaccttcagccttagcgtactgatgaaccccattgaagccagcaaaggcgacggcgaaatgggtaccggggcgatgggcgtgatggatcagaaattcggtagcgcagcagcagcttacagctacctgattttcgtcctgctgtatgtaccatgtatcagcgtgatgggggctatcgcccgtgaaagtagccgtggctggatgggcttctccatcctgtgggggctgaatatcgcttacagtctggcaacattgttctatcaggtcgccagctacagtcagcatccaacttacagcctggtgtgcattctggcggttatcctgtttaacatcgtggttatcggtctgctgcgccgcgcgcgtagccgggtggatatcgaactgctggcaacccgcaagagcgtaagcagttgctgcgcagccagcaccaccggtgattgccattaatggctagtcttattcaggtgcgcgatttgctggcgttacggggccgtatggaagcggcccagataagccagacattgaacactccacagccaatgattaacgccatgctgcaacaactggaaagtatgggcaaagccgtgcggattcaggaagaacctgacggctgcctctctggcagttgtaaaagctgcccggaaggaaaagcctgtctgcgcgagtggtgggcgctgcgttaaccttactccatcgcctgttttggaaagcccggtatgcgtctgcatccgggcttttttgcgtgcggctttccataaaaatgcaactcttgcagcacggcgtaagttcctttgaaagcatctcgcagggatgaaaactcgctaatacacaggtgtggagtggcgcgtagagtcgcggcattcaaacaacaggtgaaggaacgccatgagcaaaaagcagagttccaccccacacgatgcgctgttcaaactctttttacgccaaccggacacggctcgtgattttcttgcgtttcatttaccggcacccattcacgcgctttgtgatatgaaaaccctcaagctggagagcagcagctttattgatgacgatctgcgtgaaagctattccgatgtgctgtggagcgtgaaaacggaacaaggaccaggatacatctattgtctgattgaacatcaaagcaccagtaacaaactgatcgcatttcgcatgatgcgttacgctattgccgcaatgcaaaatcaccttgatgctggatacaaaacgttgccgatggtggtgccattgttgttttaccacggtattgaaagcccctatccctatagcctgtgttggctggattgtttcgccgatcccaaactggcaaggcagctttatgcctccgcatttccgctgattgatgtcaccgtcatgcctgatgatgaaatcatgcagcaccgacgtatggcgctgctggagttaattcaaaaacatattcgtcaacgcgacctgatggggctggtagagcaaatggcctgcttattaagtagtggatacgctaatgacagacaaatcaaagggctgtttaattacatactgcaaactggcgacgctgtacgttttaacgattttatcgacggcgttgccgaacgtagtccgaaacacaaggagagtttaatgactattgcggaaagattgcggcaggagggggaacaatccaaagccctgcatatagccaaaataatgcttgaatccggagttcctcttgcagacatcatgcgctttaccgggctgagtgaagaagagttggctgcggcgagtcagtaaagttctgtctcgccatttcaaaagccacttacaccctctgcttcaacgccaccagcaggtgacaaaactcggccggatggctaataaatggcgcatgggccgctttggcgaagatataactttcgctgtgaggccaaagtttatccagcatcggcaccactttgcgcggcaccagaccgtcgagatagccatacaatcgcaaaaacggcatggacacgttttgcagcggctgacggagatcgaccgttttcaggatttccagcccgccattaagcacgtcaacctccggcatcggtaacgccagaacggttttcttcaacgcccgcgcatcctggcgcgccgtttcagtccccatggtttgtaacgccaggaaccgctccactgtacgctgaaaatcatcactgagttgctgctgaaatcccgccagcacgtccggttttatccccggccactcgtcacgagcactaaaacaaggactgctcgccacggtgaccagcgcctgaacacgctcgggatgggttaacgcaatctggcttgccaccagcccgcccagactccagcctaaccaaatggctttatcaggtgcctgttgcagcacggcttcggccatatcagcaagactcagcgcaccaaatccccggctacgcccgaagccgggcaggtcaacaaggtgcagcgtaaaatggctgctaagttcctcgtcaatgcaacgccacacttcggcattcagtccccatccgtgcagcagcacaagatgaacattcccctgacctttggtctgccaccagatgttattcatccgctattgttctcttttgacttacaaggatgaacatatgctaacagtaccgggattatgctggctatgccgaatgccactggcgttaggtcattgggggatttgtagcgtctgtagtcgcgccacccgcacagataaaacgttatgcccacaatgtggattacccgccacacactcccatcttccctgcggtcgctgcctgcaaaaaccgccgccctggcaaagactggtcacggttgccgactatgcgccgccgttaagtccgcttatccaccagcttaaattttcccggcgcagtgaaatcgccagcgccctgagtcgtctgttactattggaagtcttacacgctcgtcgcaccaccgggttgcaattgccggatcgcatcgtcagcgttccgttatggcagcggcgtcactggcgtcggggatttaatcagagcgatttgctgtgtcagccgttaagtcgctggttgcactgccaatgggatagcgaagccgtcacacgtacacgggccactgcgacccagcattttctcagtgcccggctgcgcaagcgcaacctgaaaaatgcctttcgtcttgaattgcccgtgcaaggtcgccatatggtgattgtggatgatgtcgttaccaccggaagtaccgtcgcagagattgcgcagttgcttttacgcaatggtgcggcggctgtccaggtctggtgcctttgtcgaaccttgtaaagcctcgatgatgggcgtattataaccaactaaaatagtcaactattaggccattactatgatccgtatttccgatgctgcacaagcgcactttgccaaactgctggcaaatcaggaagaagggacacaaatccgcgtatttgtgattaaccctggcacgcctaacgctgaatgtggcgtttcttattgtccgccggacgctgtggaagccaccgacacagccctgaaatttgacctgctgaccgcgtatgttgatgagttaagcgcaccatacctggaagatgcagagatcgattttgttaccgaccagttgggttcccagttaacgctgaaagccccgaacgccaaaatgcgtaaagtggcagacgatgcaccgctgatggagcgcgtggagtatatgctgcagagccagatcaacccacagcttgctggtcacggtggtcgcgttagcctgatggaaatcaccgaagacggttacgccattctgcaatttggcggcggctgtaacggttgttccatggtcgatgtgacgctgaaagaagggatcgagaagcagctgctgaacgaattcccggagctgaaaggtgtgcgcgatctcaccgaacaccagcgcggcgaacactcctactactaagttatcccctcttttgtagattgcccgatgcgacgctaaagcgtcatttcgggcctacgttgaacatgtgccagacgttggcgcagcattgctttgtcaaatcctcggttcgtttccccgcgataatatgaccaacctctcataatttaaatttaccccgctctggtgattctcaaacgccagatgttacccgtatcattcacatgggtaccaaacatactcctgacatctgactacaataattagttttagtgggtatcagtcgtggtgccgcaatatctctgttcccgattgggataattagagtttgtcgtcagaaaattgacgttacccataacaaatgaaaggccaggtaaatcatgccattagtcattgttgctatcggtgtaatcttgttgttgctcctgatgatccgcttcaaaatgaacggcttcatcgctctcgtcctcgtggcgcttgctgttggattaatgcaaggaatgccgctggataaagttattggctccatcaaagccggtgtcggcgggacgctcggtagccttgccctgatcatgggttttggcgcaatgctgggcaaaatgctggcagactgcggtggcgcacaacgtatcgccaccacgctgattgccaaatttggtaaaaaacacatccagtgggcggtggtactgaccggttttaccgttggttttgccctgttctatgaagtgggctttgtgctgatgctgccgctggtgtttaccatcgcggcttctgcgaatattccactgctgtatgttggtgtaccaatggcggctgcactgtctgtgacccacggcttcctgccaccgcatccgggtccgactgcgattgccaccattttcaatgccgatatgggtaaaaccctgctgtacggtactattctggcaatcccgaccgtgattctcgccggtccggtttacgctcgcgtgttgaaaggtatcgataagccaattccggaaggtctctacagcgcgaaaaccttcagcgaagaagagatgccgagctttggcgtcagcgtctggacctctctggtgccggtagtactgatggcgatgcgtgcgattgccgaaatgatcctgccgaaaggtcacgctttcctgccggtagcggagttcctcggtgacccggtaatggcaacgctgattgccgtgctgattgcgatgttcacctttggtctaaaccgtggtcgtagtatggatcagattaacgacacgctggtttcttccatcaaaatcattgcgatgatgctgttgatcatcggtggtggcggtgcgttcaagcaggtgctggtagacagcggcgtggacaaatacattgcttccatgatgcacgaaaccaacatttctccgctgctgatggcctggagcattgctgccgtactgcgtatcgcgctgggttccgcaaccgttgcggcaatcactgcgggtggtatcgcggcaccgctgattgcaacgacgggtgttagcccggagctgatggttattgcggttggttccggtagtgtgattttctctcatgtgaacgatccgggcttctggctgttcaaagagtactttaacctgactatcggcgagaccatcaaatcctggagcatgctggaaaccattatcagcgtgtgcggtctggtaggctgtctgctgctgaatatggtgatttgataacactgactgccggatgcggcgtgaccgccttatccggcctacgattcgggatgaattagtaggccggataagacgcgtcaagcatcgcatccggcatcaaccgcactttacttcttcttcgctgcagctctgcgccgtctgtccaaatccttcagcaacttgttcacgccatcatcggcaaacatgctctcaagcgttgcggaaagcttgcgtcgccagtttttatactggtaactggtgccaggaatattcaccggttcggccatatccagccagtcttccggctgtagtcctaacagagcactgttactgtcggcaatgtagcgctgcaaaccacggttcagcgtcggcgtcatgctcatcaagcttgccttatgcccggcacgtttcggcagacaaccatatttatgcagtgcatccagcagcccttgcttcgccagttcgcgatcctgatacagaccgcgcagtaccacttcatccggatacagccccagggttttgcccagcgttagatccccgcactcccagtaaccgcgcagcgttggcaggtcatgtgtcgccgcaaccgccatgctctgctccggatacgctttcggtgcacggaacgtcttctcgtggtcgttttcgaaatagagcactttgtaagagtacacaccgctgctgcgcagcttaccgacaatctctaccggtacggtaccgagatcttcaccaatcaccatacagcgatgacgtttactttcgagtgccagaatgctgagcagatcatccaccggatagtgaacatacgcgccctgatctgccgtctcgccatacggtatccaccacaaacgcagcatgctcatcacatggtcaattcgtaatgcgccgcagttttgcatattggcacgcaacagctcgataaacggttcataggcacgcgcggtgatgatatgcgggtccattggcggtaatccccagttctgccccaacgggccgaggatatccggcggcgcgccaacgcttgctttcaggcaatatagttcacggtcacaccaggtttccgccccaccttccgctacgccaaccgccagatcacgatacaagccaatcggcatttcatagccctggcttatctcccagcaggcggcaaactggctgtaagccagccactgcaaccagagataaaaatcgacgtcatcacgatgttcttcgcagaactgacgcacttctggactatccacgttctgatacatctctggccatgcaggccagccccagcgcatttcgtcctctttcacttgctgggcatgtagcgcatcaaaggctgcctgccagaacaggctgtcgccctgctctgcaacaaactggcgaaacgcggccatctgctcatcatcacgttgcgcgaaacctttccacgccattcgtaatgctgtcatttttagggcggtaaccgtggagtaatcgacccagtcggcatcgcgcgcctgttgcagcgtctgttgcgtggtcggcaactgccaccaggcctgagcctcttcgctaagatggaaatcttcaacggcgttaacgtcgatataaatcacattcagccaacggcgagaagacgggctgtatgggctggcgctctccggatttgccggatagagcgcatgaatcgggttcaggccaatgaagctcccgccacgttttgccacatccaccagcatcgctttgagatcgccaaaatccccaataccccagtttttttcgcttcgcagcgtataaagctgaacgcaggcaccccacagcttttgtttattcagcaacgcctgcggttcgtaacagcgtttcggggcgacaatcacccggcaatgcgcgcgctggtcgtcctgggtgagtgtcagcgtgtgataaccttccggcagcttcgtcggtagattgaacgctttgccccccgttacatggcctttgtactgcgttccttcttcggtggtcagcagccagctatattcgccgctgccctccaccaccatcggcatttttttgccgctggtataaaccatgacattcgggactggcgttaccgccactttcgtggcggtacgttgatgcatcgcgtcaagcaaacgccgtttggtttcggcgctaatgctctgcggtttaccgtgggcattgatgtaattggggctaatccccgccgccagcgcggcattatccagacgtttgctttccatcgagcttccttagcgttttgcctgccagatacgagcctgataatcgcgaatagagcgatcgctgctaaacataccgcagcgggcggtattgaggatcgccgcgcgagtccaggcctcctggtcgcggtacagcacatccacctgcttttgtgcctctacataggctgcgaaatccgccatcaccagatacggatcgccgccctgtttgccgatactgtgcagcatctggtcgaaggcatgcttatcgccgtcgctgtatttaccgctttccagctctttcaatactgcgtccagcaccttatctttcttccgccatttcaccgggtcgtagcctttggccagaattgccttcacttgttccacggtatgaccaaaaataaagatattttcttcaccgactttctcggcgatttcaacgttcgccccatccagcgtaccgacagtaagcgcaccattgagcgccagtttcatattgccggtaccggaagcttctttacctgcagtgctaatttgttcggagatatccgccgccgggatcagtttttccgccgcgctaacgcaataatccggcaggaacaccaccttcaacttatcgccaaccagcggatcgttgttgatcacgtcagccactttgttgatcgcaaagataatattcttcgccaggtagtagcccggtgccgctttcgcgccgaagaggaagacgcgcggtacgcgatcagcctgcgggttttcacgaatttctttgtacaacgccagaatatgcagcagattcaggtgctggcgtttgtactcatgcaaacgtttgatctgaatatcgaaaatcgcctgtggattgatctcaataccggtacgaactttcacaaactccgccagacggactttattcgcctgcttgatctcgcgatattgctgacggaatttcgcatcatcagcgaatttttccagattgatcagctgatcgagatcgttagcccactctttttgcagacttttatccaacagagccgccagtgccgggttgcactgtttgatccagcgacgtggggtaataccgttggtgacgttatggaatttgttcggccatagctggtgatattccgggaacagatctttcaccaccagatcgctgtgcagcgccgcaacaccgttcaccgcgaaaccgccaaccacacacaggttcgccatatgcacttgtttgtcgtgcaccaccgccagtttggcccacactttttcatcgcccggccaggttttctctaccagcgttttaaagcgagtattaatttcgttaataatctgcatgtggcgcggcagtaagcctttcaccagtttcacatcccagcgttccagcgcttctggcatcagggtatggttggtgtaagcgaaagttttgctggtaatggcccaggcgtcatcccagctcatctggtgctcatcgatcagcacgcgcagcagttctggaatcgcgatagttgggtgggtatcgttcagctgaataacttcgtaatccgccagttcgtgcagtttacgccccgccagatgatggcgacgcaaaatatccgctacgctacaggcacactggaagtattgctgcatcaggcgcagctttttaccggcagtatggttgtcgtttggatagagaactttggtcagtttttccgcattgatgccctgctgttcggcacgcaagaaatcaccgtcgttaaatttagtcagatcaaacggatgcgcgtgcgtcgcctgccacagacgcagcggctgcgccacgccattacgatagccgacaacggggagatcccacgcttgaccggtaatggtaaactccggctcccagcgtccgtctttcgtcactttaccgccaatccctacctgcacatccagtgcttcgttgtggcggaaccacgggtagttactgcgatgccagtcatccggcgcttcaacctgtttgccatcgacaaaagactggcggaacaaaccatattgatagttcagaccgtaacccgtcgcagactgaccgacagttgccatactgtcgaggaagcacgccgccagacgtcccagaccaccgttacccagcgccgggtcgatctcttcttccagcaggtccgtcagattgatgtcataagccttcaagctatcctgtacatcctgataccagccgagattcaacaggttgttgcccgtcaggcgaccaatcaaaaactccatactgatgtagttaacatgtcgctgattcgccaccggcttggcgaatggctgagcacgcagcatttcggccagtgcttcactcactgctagccaccactggcgaggagtcatttcagccgcagaatttaagccataacgctgccactgacgactaagcgcttcctgaaattgcttatcgttaaaaataggttgactcataggagttccacttttcttagattttcaacacaacgttatcgctagtttgccaggctcgatgttgaccttcctcatcctgcgggggattaggcagggaggagttgcggggatgagcaaggaaatgtgatctcaaccacttaaagctagtgcaaaccacaggattagcatcaaatcaatgcaatacagcgcagaaaatctgtatctaagtgcaaaaaatggccgttgcgtattttcaaaaagcggaaggtaactctataaattaagtaaaggagtgaaacagtttcataagtaaaatatccagtgtgctccatctcattcttaatagatttattaagatcatctttttagatggcactttcatcaggaatgaagaagaaacccttgcttaaatgaatctgatgaacataagggaaaccagtattcacgctggatcagcgtcgttttaggtgagttgttaataaagatttggaattgtgacacagtgcaaattcagacacataaaaaaacgtcatcgcttgcattagaaaggtttctggccgaccttataaccattaattacgaagcgcaaaaaaaataatatttcctcattttccacagtgaagtgattaactatgctgattccgagtaaactaagtcgtccggttcgactcgaccataccgtggttcgtgagcgcctgctggctaaactttccggcgcgaacaacttccggctggcgctgatcacgagtcctgcgggctacggaaagaccaccctcatttcccagtgggcggcaggcaaaaacgatatcggctggtacagcctggatgaaggtgataaccagcaagagcgtttcgccagctatctcattgccgccgtgcagcaggcaaccaacggtcactgtgcgatatgtgagacgatggcgcaaaaacggcaatatgccagcctgacgagtctcttcgcccagcttttcattgagctggcggaatggcatagcccactttatctggtcatcgatgactatcatctgatcactaatccagtgatccacgagagtatgcgcttctttattcgccatcaaccagaaaatctcaccctggtggtgttgagtcgcaaccttccgcaactgggcattgccaatctgcgtgttcgtgatcaactgctggaaattggcagtcagcaactggcatttacccatcaggaagcgaagcagttttttgattgccgtctgagtagcccgattgaagccgcagaaagcagtcggatttgcgatgacgtttccggttgggcgacggcactacagctaatcgccctctccgcccggcagaatacccacagtgcccataagagcgcacgccgcctggcgggaatcaatgccagccatcttagcgattatctggtcgatgaggttttggataacgtcgatctcgcaacgcgccattttctgttgaaaagcgccattttgcgcagtatgaacgatgccctcatcacccgtgtgaccggcgaagaaaacgggcaaatgcgcctcgaagagattgagcgtcaggggctgtttttacagcggatggatgataccggcgagtggttctgctatcacccgctgtttggtaacttcctgcgccagcgctgccagtgggaactggcggcggagctgccggaaatccaccgtgccgccgcagaaagctggatggcccagggatttcccagcgaagcaattcatcatgcgctggcggcaggcgatgcgctgatgctgcgcgatattctgcttaatcacgcctggagtctgttcaaccatagcgaactgagcctgctggaagagagccttaaggccctgccgtgggacagcttgctggaaaatccgcagttggtgttattgcaggcgtggctgatgcaaagccaacatcgctacggcgaagttaacaccctgctagcccgtgctgaacatgaaatcaaggacatcagagaagacaccatgcacgcagaatttaacgctctgcgcgcccaggtggcgattaacgatggtaatccggatgaagcggaacggctggcaaaactggcactggaagagctgccgccgggctggttctatagccgcattgtggcaaccagcgtgctgggtgaagtgctgcactgcaaaggcgaattgacccgcagtctggcgctaatgcagcaaaccgaacagatggcacgccagcacgatgtctggcactacgctttgtggagtttaatccagcaaagtgaaattctgtttgcccaagggttcctgcaaaccgcgtgggaaacgcaggaaaaagcattccagctgatcaacgagcagcatctggaacagctgccaatgcatgagtttctggtgcgcattcgtgcgcagctgttatgggcctgggcgcggctggatgaagccgaagcgagcgcgcgtagcgggattgaagtcttgagctcttatcagccacagcaacagcttcagtgcctggcaatgttgattcaatgcagcctggcccgtggtgatttagataacgcccgtagccagctgaaccgtctggaaaacctgctggggaatggcaaatatcacagcgactggatctctaacgccaacaaagtccgggtgatttactggcaaatgaccggcgataaagccgccgctgccaactggttgcgtcatacggctaaaccagagtttgcgaacaaccacttcctgcaaggtcaatggcgcaacattgcccgtgcacaaatcttgctgggcgagtttgaaccggcagaaattgttctcgaagaactcaatgaaaatgcccggagtctgcggttgatgagcgatctcaaccgtaacctgttgctgcttaatcaactgtactggcaggccggacgtaaaagtgacgcccagcgcgtgttgctggacgcattaaaactggcgaatcgcaccggatttatcagccattttgtcatcgaaggcgaagcgatggcgcaacaactgcgtcagctgattcagcttaatacgctgccggaactggaacagcatcgcgcgcagcgtattctgcgagaaatcaatcaacatcatcggcataaattcgcccatttcgatgagaatttcgttgaacgtctgctaaatcatcctgaagtacctgaactgatccgcaccagcccgctgacgcaacgtgaatggcaggtactggggctgatctactctggttacagcaatgagcaaattgccggagaactggaagtcgcggcaaccaccatcaaaacgcatatccgcaatctgtatcagaaactcggcgtggcccatcgccaggatgcggtacaacacgcccagcaattgctgaagatgatggggtacggcgtgtaagtttagccggataacgcgccagatccggcttacatctctgcatcattcaatgctcacccgcgttacgccatctgtttctatcaaactaaaccgcaccggcaagaaacgctccaccaccgcgatattggtcagcagatggcaactgggatgggcgaccgtaaattcccccgcgcccgccagcgccatcggtagcaccagttggtcagcaagatattcccccaccgccgccgtgcttgccaggtagcgtttcacctctttcaccaactgtgccgcaaccacctcggcactgacgcgcttttcaccgacgacaaaaaagcgttcggtgatattttcactttcgacttcaaggctgacggtattacccggcccctggtcgcgcggcaggttatgaatattctgttcatgcagggaaaaactccccgccagtgtagcgatttcacgctcagcaacatggcgcggcacaccagctaatagaacttctccacgcatctgcacaatgttcccgcgctcgccaagttgcaaggtgttaaagcttgccacggggctgacttccgttgccaccacaccgcctccggcagggtaaaaaccgtggcgtaacagcgtggtttgctgatgaattcctattttcgccagcagcggctccagcacccggcggataaaatccgcaggcggcgcgctcgggttatcggtgccgccgctcacttcaacacggctaggtccatcggcaaaccacagcgcgggcagcaccgtttgcagcaccagcgtacaacttccggcgctaccgatagcaaagcggtaatcgccgccgcgcacggtgccgggccggaagagcagacgctggctccccagctccgcgccttccacggttgctccgcaaatttccgtcgccgcctttaccgcggtcagatgctggcgcaacagccccggtttcgcccgcccggcacgaatgctggtgatggtaaatggctggccggttatcatgctcaggctcagcgcgctgcgcaggatctgcccgccaccttcgccctgtgcgccatccagcgcaatcatccttttcatcatttatccttttacgcacaccacctgacgcagggtatagataacttccaccagatcgctttgtgccgccatcaccgcatcaatatctttatacgccatcgggatttcgtcgatcacttcggcatctttacggcattccacatgcgcggtggcacgaatttgatcttccacgctgaacagttttttcgctttagttcggctcattacccgcccggcaccgtggctgcagctacagaagctctcttcatttcccagcccacggacgataaagctttttgctcccatgctaccgggaataattccatattgaccagcacgcgcagacaccgcgcctttacgcgtcacgtagatctcttcaccaaagtgctgttctttttgcacatagttgtggtgacagttgatctcttccatcgccagcgtttgtggctgtctgaccgttttctgcgtaatgctctgcaatgccgttaccacgttttccatcatcgcatcgcggttaaggctggcaaaaagctgcgcccaggccacggctttcaggtaatcatcaaagtattccgtaccttccataaagtacgccagatcacggctcggcaacgtctcaagcgtttcctgcatctctttttgtgccagatcgataaagtaagtcccgatggcgttaccaattccgcgactaccggagtgcagcataatccacacctggtcgctctcatcaaggcagatttcaataaagtggttaccggttcccagcgttcccaggtgtttatagttattggtattcaggaaacggggatatttttgcgttaaccactgataaccggcttcaagctcagcccatttagcatcgacgttaacaggtggattttcccaggcacctttatcacgtttacaacggccagtggtacgcccgtgcggcacggccgtttcaatcgcctgacgcagctctgccaggttttcaggcaggtcttccgccgttaacgcggtacgcagcgcgttcattccacagccaatatccacgcccaccgccgccggaataatcgcccctttggtcgggatcacgctaccaatggtggaacctttacccaggtgtacatcaggcattaccgcaatatgtttgaaaataaacggcatcttcgccgtattaataagttgctgacgcgcatcggcctctaccggcacgcctttggtccacatttttaccggggcattttcagtggtcagtaattcgtaattcattttgtttttctcttttcgttgtttgctgtcctgataattgcaaccgtcgtgccagaaaattaaataagcagcttaattttttaattcattgttttaaaaaagattatatctttacgtccgtaaccggagatttcccgcaaagccaatttaccgataatgaaatatcgtcttttataaggatatctaagatgcgtaaaacagtggcttttggctttgtcggtaccgtactggattatgccgggcgcggcagtcagcgctggagtaaatggcgtccgacactctgtttatgccagcaagaaagcttggtcatcgatcgactggaattgttgcacgacgcccgcagccgcagcctatttgaaacgcttaaacgcgatatcgccagcgttagcccagaaacagaagtggtgagcgttgagattgaactgcataacccgtgggatttcgaagaggtctacgcctgcctgcatgatttcgcccgtggttacgagtttcagccagaaaaagaagactatttaattcacatcaccaccggtacccacgtcgcgcagatttgctggtttctgctggcagaagcgcgttacctgcccgcccggctgatacaatctagtcctccgcgcaaaaaagaacagccgcgcggcccaggtgaagtaacgattatcgatctcgatttaagccgttataacgccatcgccagccgctttgccgaggaacgccagcaaacgcttgattttcttaagtccggcattgccacgcgtaacccccacttcaaccgcatgattgagcagatcgaaaaagtggcgatcaaatcccgcgcgccgattctgcttaacggtccaaccggcgcgggcaagagttttctggcgcgacgcatcttagagttaaaacaggcgcggcatcagtttagcggcgcgtttgtggaagtgaactgcgccaccctgcgcggcgataccgccatgagcacgctgtttggtcatgtaaaaggcgcgtttaccggggcgcgggaatctcgtgaaggtttattacgcagcgccaacggcggaatgttgtttcttgatgagattggcgaactgggcgcagacgaacaggcaatgctgctgaaagccattgaagagaaaaccttttacccgtttggcagcgatcgccaggtgagcagtgattttcagcttatcgccggaacggtgcgcgatttgcgccagctggttgccgaaggcaaatttcgcgaagatctgtacgcgcggatcaatctctggaccttcaccctgccgggtctacgccagcgccaggaagatattgaaccgaacctggattatgaagtggagcgccacgccagtctcactggcgacagcgtgcgttttaacaccgaagcgcggcgcgcctggttggcttttgcgacctctccccaggcaacatggcgcggtaactttcgcgaactttctgccagcgtcacgcggatggccacctttgccactagcggacgcatcactctggacgtggttgaagatgagataaaccgtctgcgctataactggcaggagagccgcccctccgcgcttacggcgttgctgggcgcagaggcagaaaacatcgatctcttcgaccgtatgcaactggaacacgttatcgctatctgccgccaggcaaagagcctttccgcagccggacgccagctttttgacgttagccgccagggcaaagccagcgtcaatgacgcggatcggctacgcaaatacctggcgcgttttggtctgacgtgggaagccgtgcaggatcagcacagctccagttgaatatggtggtccgtcagcacctgcatcacgcttactggcggcggggcgtcggtgtagacggcatctaccatgctgatgctgcccatattgaccatcgcgttacggccaaatttcgagtgatcgacaaccagcataacgtggcgcgagttctcaataatggcgcgtttggtgcgaacttcgtggtaatcgaactccagcagcgagccgtcgctatcgatgccgcttatccccagaatgccgaaatcaaggcggaactgggagataaaatcgagcgtcgcttcgccaatgatcccgccatcgcggctgcgtaattcgccaccggcgagaatgatgcgaaaatcttcttttaccatcaacgtgttagcaacgttgagattgttggtgacaatgcgcaaattgctgtgattgagcagtgcgtgcgctaccgcttccggcgtggtgccgatatcgataaacagcgtcgagccattggggatttgctccgccactttgcgggcgatgcgctctttttcttcggtctgggtggccttgcgatcgtgccacggcgtgttaaccgaactggaaggcagcgccgcaccgccatgatggccaggatcaggttttgctccgccagctcattgaggtcgcggcgaatagtctgcgggctgacggagaaatgctctaccagctcttcggtactgacataaccctgctgtttaaccagttcgataataccgttgtgacgttgtgtttgtttcatttataaatccctggaattattttcgttttcgcgcattgaggctatcaacaaaagccatcgctaaacccacggctaacccggcgatgtgtgctccgttcgccatgctcatcccaaacaaatcaaaccatccggcgacaatccagatcagcgcaaagataattaacccacgttgcaggtaaatgccactttgcggatcgcgttcgccacgtagccagacgtagcccatcagcgcatacaccacgccagaaagcccgccaaaccacggcccgctgaatttttgctgcacatagccgcttaacagggcgctgataagcgtaatgacaattagcttaccgctaccgaggcgtttttccaccgcaccgccgagataccaccaccagagcaggttaaagaggatatgcatcaggctgaagtgcattaacgcgtgggtgaagtaacgccagaactcaaatttcagtgttggatcgaatggccaggccagccataacatcacttcctgatcgccgagaatttgcatggcaataaacaccaccacgcaggcgatcatcatcacccaggttaccggacctgcgcgttcacgcaaggcggcaaagaaaggataacggcgataatgcaggccactgccggtatggcctgcctgccagctcgccgccagataacgcggatctgccgggttttcgagaaaacgcgccagctccgcccgtacgcgctcggcctgggactcatccgccagccagacatcgctttggttatgttgttgaatcgtgaggataacaccctgcgtcgccatgtaatcaacaaacgcctgcgccacgcgggggttagcaaaagaggtaatcatcaacatcgttgctgtcgcttattccacacaaaaggggacagtataaagcgttacgcgccgtacgccacctctgcgggaaactgacgttgccaggcttcaaagccgccgtcaatgctatagaccacatcgtagccctgttgcagcagatactgcgccgcgcctttgctgctattgccgtgataacacatcaccatcaccggagtgtcaaagtcgttatcacgcataaaagcgcccagcgtgtcgttggttaaatggaaagcctgcaccgcatgtcccattgcgaaactctgtggatcgcgaatatcgaccagcaccgcctctttttcctgcaacttctggtgcgcgtcggcaacgttaatacattcgaactgatccatgcgtctctctttctttacaaacaagtgggcaaatttaccgcacagtttacgtcgaagcggcagataaacgccataatgttatacatatcactctaaaatgttttttcaatgttacctaaagcgcgattctttgctaatatgttcgataacgaacatttatgagctttaacgaaagtgaatgagggcagcatggaaaccaaagatctgattgtgatagggggcggcatcaatggtgctggtatcgcggcagacgccgctggacgcggtttatccgtgctgatgctggaggcgcaggatctcgcttgcgcgacctcttccgccagtagtaaactcattcacggtggcctgcgctaccttgagcactatgaattccgcctggtcagcgaggcgctggctgaacgtgaagtgctgctgaaaatggccccgcatatcgccttcccgatgcgttttcgcctgccacatcgtccgcatctgcgcccggcgtggatgattcgcattggtctgtttatgtacgatcatctgggtaaacgcaccagcttgccgggaagtactggtttgcgttttggcgcaaatagtgtgttaaaaccggaaattaagcgcggattcgaatattctgactgttgggtagacgacgcccgtctggtactcgccaacgcccagatggtggtgcgtaaaggcggcgaagtgcttactcggactcgcgccacctctgctcgccgcgaaaacggcctgtggattgtggaagcggaagatatcgataccggcaaaaaatatagctggcaagcgcgcggcttggttaacgccaccggcccgtgggtgaaacagttcttcgacgacgggatgcatctgcctagcccttatggcattcgcctgatcaaaggcagccatattgtggtgccgcgcgtgcatacccagaagcaagcctacattctgcaaaacgaagataaacgtattgtgttcgtgatcccgtggatggacgagttttccatcatcggcactaccgatgtcgagtacaaaggcgatccgaaagcggtgaagattgaagagagtgaaatcaattacctgctgaatgtgtataacacgcactttaaaaagcagttaagccgtgacgatatcgtctggacctactccggtgtgcgtccgctgtgtgatgatgagtccgacagcccgcaggctattacccgtgattacacccttgatattcatgatgaaaatggcaaagcaccgctgctgagcgtattcggcggtaagctgaccacctaccgaaaactggcggaacatgcgctggaaaaactaacgccgtattatcagggtattggcccggcatggacgaaagagagtgtgctaccgggtggcgccattgaaggcgaccgcgacgattatgccgctcgcctgcgccgccgctatccgttcctgactgaaagcctggcgcgtcattacgctcgcacttacggcagcaacagcgagctgctgctcggcaatgcgggaacggtaagcgatctcggggaagatttcggtcatgagttctacgaagcggagctgaaatacctggtggatcacgaatgggtccgccgcgccgacgacgccctgtggcgtcgcacaaaacaaggcatgtggctaaatgcggatcaacaatctcgtgtgagtcagtggctggtggagtatacgcagcagaggttaagcctggcgagctaaattaacgtaaggtgatcaggtcagatttcaatctggcctgagactgatgacaaacacaaaactgcctgatgcgctacgcttatcaggcctacgtggtttatgcaatatattgaatttgcatggtcttgtaggccagataagacgttcacgtcgcatccggcatgaacaaagcgcactttgtcaaaaatctaacctactttttaattcagggaattaccgcaaagcccacgccatcatacccaacgtaacaaaactcaggcacgttccccactcgcccgctgaaaaatagcattaatgcgcccagcgccagcataaaaattttgagcagaaggtaaattgttggcgtgataaggatattacaaacttcaataataccggcaagtccgacacccagcatggcaataaccaccgccaaaaattgcgccagtatggggatgccgaaaaaagtcattaccaggctggtcaaaatccattttctgttttgcattattctttccattctttttgaatggtgaaattatactccccgagtccccttgccccttctggacacttttccgaaatgatggcggaaaaaaacgggaccctttggccccgttctatttattggtgaacttacaatctcaccggatcgatatgccagatatgatcggcgtactctttgatagtacggtcagaagagaagtagcccatattggcaatgttcagcatcgcttttgcggtccactcttcctgaagctcgtagagttcatcgactttatcctgacaatcgacatagctgcgataatccgccagtacctggtagtgatcgccgaagttgatcaggctatcaaccagatcgcgatagcgacccggatcttccggactgaatacaccgctgccgatttgcgtcagcacctgatgcagctcctcatctttctcgtagtattcacgcggtttgtagccctgacgacgcagttcttccacttcttccgctgtgttaccaaaaataaagatattgtcagcaccgacatgatccagcatctcgacattcgcaccgtccaacgtaccgatagtcagcgcaccgttaagcgcaaacttcatgttactggtgccggaagcttccgtccctgccaggctaatctgttcagacagatctgccgccggaatgatcaactgcgccaggctaacgctgtagttcgggatgaacacgactttcagcttatcgccaatctgcggatcgttgttgatcactttcgctacgtcattgatcaaatgaataatgtgcttcgccatgtaataggcgctagccgccttaccgccaaaaatattcacgcgcggtacccacttcgcatccgggtcggccttgatgcggttatagcgggtaatcacatgcaacacattcatcaattgacgtttgtattcgtgaatacgtttgatttgtacatcgaacaacgcctttggattcaccaccacattcagctgctgggcgatatactctgccagacgctttttgttctccagcttcgcctgatgcacagcgtgattaaccattgggaaatcacagtgttgttgcagctcattaagcaggctaaggtcggtgcgccagttacggcccaggtgttcgtccagcacggcactaaggcttgggttcgctaccgccagccagcgacgcggcgtcacaccgttggtgacgttggtgaaacgacccgggaagattttcgcaaagtcggcaaacaagctttgcaccatcagattagagtgcagttcgcttacaccgttaactttgtggctcacaacaaccgccagccaggccatacgcacacgacgaccgttggattcatcaatgatgctcgcccgtcccagcagatcggtatcgttcggatactgttcctgcaaggttttcaggaaatagtcgttgatttcaaagatgatctgcaggtgacgcggcagaattttacccagcatatcaaccggccaggtttccagcgcctcgctcatcagcgtgtggttagtgtaggagaagacctgacaacacacctcaaacgcgtcgtcccagctaaattggtgctcatcgatcagcagacgcatcatctcaggaatgctcagtaccggatgggtatcattgagatgaatcgcgattttatccgccaggttatcgtaggttttatgcaactgataatggcggcttaaaatgtcctgaatggtgctggaaaccaggaagtattcctgacgcaggcgcagctcacgcccggagtaggtggagtcatccggatacagtacgcgagatacgttctcggagtggtttttatcttccactgccgcgaagtagtcaccctggttgaatttaccgaggttaatttcgctactggcttgcgcactccacaaacgcagcgtgttggtcgcgtcggtgtcgtaaccagggattatctgatcgtaagcgactcccagaatctcttcggtttcaatccagcgcgtttttttaccttcctgctgaatgcgaccgccaaaacggactttatagcgcgtgttgtggcgtttgaattcccacgggttaccgtattccagccagtagtctgggctctctttctggctaccgttaacgatgttctgcttgaacataccgtagtcatagcggatgccgtaaccgcgccccggcaaccctaacgtcgccagagaatcaaggaagcaagccgccagacgtcccaggccaccgttaccgaggcctgggtcattttcttcatcaatcagctcttcgagatttaaccccatcgcttccagtgcgccctgtacatcttcgtaaattcctaggctcaacatggcgttggagagcgtacggccaatcaaaaactccatgctcaggtagtaaacctgacgagtttcttggctcaactgggcacggttactacgtaaccagcgctccacgagacgatcgcgcacagcaaataacgttgcgttcagccattcatgtttattggcgacgaccgggtcctttccaatcgtaaacatcagcttgtaagcgatagagtgcttaagagcttctacgctaagcgtggggctactatatgtaaacggagcattcatataggcgtttcctgaaaattatttcaagcgatagtaaagctcacggtagctcttcgccgcgacctgccagctaaaatccattgccatagcctgacgttgcacaaaccgccacagactaggacgggaccacagtacaaaagcacgtcgaatagcccgtaacaggctccaggcattactatcttcaaagacaaacccactggcgacgccatctgcaaggttctcaagagaacagtcagaaaccgtatcagcaagcccaccggtgcgccgcactaacggcagcgtaccgtacttcaatccataaagttgcgttaagccgcacggttcaaaacggctgggcaccagaatgacgtccgcgccgcccataatgcgatggctaaatgcttcgtgatagccaatctgaacgcccacctgaccggggtattccgctgccgccgcaaggaaaccttcctgcagcaccggatcgcccgcgccgagtagcgccagctgcccgccctgctccagaagacccggtaaggcttccagcaccaggtcgagacctttctggctggtcagacggctcaccactgcaaaaagcggcactttatcgtcaaccttaagccccattgcgatttgtaactggcgcttattttccgctttatcttccaacgtatcgcgggtgtaacggctggccaacagtaagtccgtctctggactccagattttctcgtccacgccgttcagtacgccggaaagacgcccttcacggtgacgctgttgcaacagaccttccataccgtaggcaaactgcggttcggtgatctcgcgagcgtaggttggactgaccgccgtaatgtgatcggcatagtacagaccggccttcaggaaagagatttgtccgttgaattccagcccatgaatattaaagaaactccatggcaattggatgtcattcatgtgatgtgcataaaacatgccttgataggccaggttgtgcacagtaaacacgctcttcgccggacgcccgcgcgccgccagatacgcaggcgcaaggcctgcatgccagtcgtgcgcatgcaccacatcaggacgccagaatgggtcaagcccgctggccatttctgccccaacccaccccagcagcgcaaaacgcaatacgttgtcggtataggcaaataagttggtatcgtgatacgggcttcccggacgatcatagagatgcggcgcgtcaatcaggtaaatgccaaccccgttgtaatgaccgaacaacagcgtgatatgtccggcgaaggtatcacgacgggatactacctgcgcatcggtcacgccacggcgaatatcgggaaatgcaggcaacagtacgcgagcgtcaacgccgtctgcgatttgtgctgcgggtaatgccccaataacatcagccagaccgccggttttaagcagcgggaacatctcactacatacatgtaaaacctgcattatcgctcctgtttatgccctaacttccgtagcatttcgcgcgttaccagcacgatgccttcttcactacgatagaaacgacgtgcatcttcctctgcgttttcaccaatcaccatgccttccggaataacacaagcacgatcgatgacgcagcggcgcagacggcagctgcgacctacccatacttccggtaacaatacggcggaatcaatgttgcagaaactattcacgcgaacgcggctgaacagaacggactgcaccaccacgctaccggagatcacacaaccgccggaaaccagactgttaagggtcatcccgtggctaccggagcgatcctgcacgaatttcgctggcggtaaactttcattgtaggtgcgaattggccaattgcgatcgtacatatccagttccggcaccacagaggccagatcgaggttcgctttccagtaagcttccagcgtacccacatcgcgccagtacggctcggcatccgggtcggattgtacgcaagagagcgggaacgggtgcgcataggccagaccggcttcggtgatcttgggaatcaaatctttgccaaagtcgtggctggagttctcatcgcgatcgtcttcttccagcagttcatacagatagtcggcgtcaaagacgtagatacccatactcgccagagatttgctcggatcgttcggcatactcggcgggttagcaggtttttcaacgaattcgataattttatcgttctcatcaaccgccataacgccaaatgcggaggcttcttcaatcggtactggcatacaagcaacggtgcaacgtgcgcctttttcgacgtgatcgataagcatacggctgtagtcttgcttgtagatatggtcgcccgccaggatcaccacgtattccgctttataacggcggataatgtcgaggttttgggtgaccgcatctgcggtgccgcgataccagttttcccctttcattctctgctgtgctggcagcagatcgacaaactcgttcatttcttcattgaagaaactccagccgcgctgaatgtgctgcaccagagtgtgggactggtactgggtgatcacgcccatacgacggatcccggagttgatgcagttagacagcgcaaagtcgataatgcggaacttaccgccgaagtgtacggccggttttgctcgcttattggttaaatccttcaggcgggtaccacgtcctcccgccagtatcagggcaacagatttcaatggcagctggcgcgccaacattaagtgatcgttcttctctaaactaaccatgactaactccttttttatcatctctggaacacacacaatccgtgtgcaggtccctgccagacagccgtaatcactgggttatcctctccagcgaatgggggaatggcgtgccactccccagcaggtaaaacaatctctgttacctcaagcgtggcgttaattgcgatcaaaaagcgatcgctgagcagaatttgcagctgtttcggcccgttttgccactcatccgtgcttaaaggttgagcatatcgatttagccaacggacattgccgtcgccttcttcccaccagcgattctccaccaaagcgggaatgcgcttgcgcagatggattaacgcggcggtaaatgcggttaaaccactgcttgcctggctccagtccaaccaggttaattggttatcctgacagtaggcattgttattgccatgctggctgtgaccatgttcgtcaccggccagtaacatcggcgtaccctgggagagcaacaacgttgttaacagggcgtgaatgctgtcgcgccgccgttcaaccaggtcaagagaaccgcctaacccttctttaccatgattgttactgtaattgttgttggtcccgtcgcgattttcttctccgtttgcttcattgtgtttatggttgaagcaaacgcagtcgcgaagcgtaaaaccgtcatgcgcggtgacgagattaatcgcggcactcggcagacgaccattacgtttaaaaacatcgctggaggcagcaaaacgcccggcaaacgcccccagaggcaaatcataatgtagccagaaacgacgggcagcatcgcggaaatgatcgttccactcggcaaacagcggcgggaaatttcccacctgataaccaccaggagcgatatcccacggttcagcaattaacttcacctggctgagcaccgggcagttctggatagcggtaaacaacggcgcatcctgacggaactctggcgtacggcccatgactgccgccagatcaaagcggaaaccatcgacgtggcaggtttctacccaataacgcaggcaggcgctggcataatccaccaccgccggatgactcaaattgagcgtgttgccgcaaccggtccagttgtgataatcgccgtcttctcttatccaataatagctacggttatcgatcccacgcaggctgaataacgggccgtcgaggtccagttccgcactatggttgagcacgatatcaagaatgacttcgatacccgctttatgcagtgctttgattgcatcgcgaaactcatccagcgccgtttctgggctgcaggcatacgccggatgcagcgcaaacatcgccaccgggttgtaaccccagtagttacttagccccatgcgttgcagacgtggttcactggcaaactgcgccactggcagcagttccagcgcggtaatgcccaattgtttcaaatagttgatcatcaccggatgcccgagggctttataagtgccacggatctcgaccgggatctccgggtgcaagtacgttaatcctttgacatgggcttcataaatgatggtgctgccccacggcgtgcgcggcggggcatcatcttcccagtcatagtgatcaaccaccactacgcatttcggcgcaatggcggcgttgtcgcgatagtcaggttcattatgaccggcgtgcagcagcgggttatctttaaactccccgtcaatttgccgcgcgcaaggatcaatcaacaacttcgccgggttaaagcgatgcccctcggcgggttgccaggggccatgaacgcgataaccataacgcaaacccgggcgcgcatccggcagataaccgtgccaaatgtcgccactgtgccctggcaagtcatagcgatgttcctggccattggcgtcaaagacacacagttctacccgctcggcatgagcggagaaaagtgtgaagttgacgccctgaccgtcgtaatgcgcgccgaggggagcgggtttgccaatggcgagttgtgtcattctgcctcccgaaccagccagatagtggccagcggtggtagcgtcaggcttagactatgctgacgaccgtggctggcaatctcatcgctgtgtaccgtgccgccattgcctgcattactgccgtgatagtgcatggaatcggtattgaggatttcacgccatttgcccggctggtttatgccgaagcgataatcatgacgcggtaccggcgtaaagttactggcaacgatgatttcgttaccctctttatcgcgacgcacaaagatcagcacgctgcgttctttgtcatccaccaccagccattcaaagccgtacgggtcaaaatccagttcatgcattgctttatggtggcggtaggtgaggttcagatcgcgcaccagacgctggacaccgtggtgccagttatcgccgccttccaacagatgccagtcgaggctggcgtcatggttccactcgcggccctgggcaaattcgttacccatgaacagtagtttcttgcccgggaatgcccacatccagccatagtaggcgcgcaggttcgcgaatttctgccatgcgtcgcccggcatgcggtcgagaatgctttttttaccgtggaccacttcatcatggctcaacggcaggacgaagttttcagtgtagttgtagagaatcccgaaggtcagtttatcgtgatgatactgacgataaaccgggtcgagcttcatgtagtccagggtgtcatgcatccagccgaggttccacttgtaccagaagcccagaccgcccatatcctgcggacgagaaacgccagggaaatcggtagactcctcagccattgtcaccgcaccggaaacctgctcaccaagaatacggttggtattacgcaagaattcaatcgcttcaagattctcgcgcccgccaaattcgttcgggatccactccccctctttacggctgtagtcgcgataaatcatactcgccaccgcatcgacgcgcagcgcatcaataccaaaacgttcaatccagtaaagcgcgttaccgacgaggaagttactgacttcacggcgaccatagttgtagatcagcgtgttccagtcctgatgatagccttcacgcggatcgctgtgttcatacaagttcgtgccatcaaattcggcaagcgcaaagtcatcagtcgggaagtggcctggcacccagtcgagaatcacgttcagaccagctgcgtgtgcggcatcaatgaaataacggaagtcgtcgcgagtaccaaaacggcgggttggcgcatacaggccggttggctgataaccccaactgccatcgaagggatgctcgttaatgggcagtagttcgaggtgggtaaagcccatccatttagcataaggcaccagttgatcggccagctcgcggtagctcaaccagaaattgttgtcggtgtggcgacgccaggaacccaggtgaacttcataaatagagattggcgcatcaaactgattcgcttttttgcgctcttcagtctgtacaaccttttccggcagcccgcaaataagagacgcggtttccgggcgcatttgcgcttcaaaggcataagggtcggacttcagacgcaagttgccattggcatcaatcatctcgtatttatagagctgaccgttatgcgccccagggataaacagttcccagatgccgctctctttacgcaggcgcatcgggtgacggcgaccgtcccagtagttgaattgcccaaccacgctgacccgacgggcgtttggagcccagacagagaaacgcgtacctgtgacgccatccatagtatctgcatgcgcgcctaaggtttcatacgggcgcaggtgagtaccttcagataatagccaggcatccatttcctggattagcggaccaaaacggtaaggatcatcaatcaggttttgctgaccatgccagacaacagccaactgatagcggaaaaaattcttacgtcgcggaatgacgccgctaaagaatccccgactgtcgagacactccagttttgcgagtttgcgcccggttttcggttcaatcacccacacatcggtagcgtcgggtaaaagggcacggacttccagtcccgcggtggttttatgcattcccagtacggaaaaaggatccgcaaaatggcctgcaattagcgcgttaatcacgtctctatcgatacgatcggacatgcttgtcttcctgttttattgtgtcaccccatccaattggatttttgacttctggttgtgacatttttttgacctgaacggcgcagcactctgtgcatcctctctgcgtcgtcctcacttcaggtaaggctgtgaatactcatgtattcagccacccttaaagaatagccaatgctctatttaactcccggtaaatcatgaaacatctgcgcttactcctgtattacgcactaacaggggcggcatcgcgccccagatttaatgaataaagattacgccagttgacgaagcatccgacgcagcggctccgcggccccccacagcagctggtcgcccacggtaaaggcactcaggaactctggtcccatattcagcttacgcaggcggcctaccggcgtggtcagcgtgccggtaacggcagctggggttagctcacgcatagtgatttcccgatcgttcggaacgactttcgcccacggattgtgcgcagccagcagttcttccacggtcggaatagacacatcttttttcaatttaatagtgaatgcctggctgtggcagcgcaatgccccgacacgcacacataaaccatctaccggaattacggaagatgtgttgaggatcttgttggtttccgcctgccctttccactcttcgcggctctgaccgttatcgagctgtttgtcgatccacggaatcaggctacccgccagcggcacgccaaagttatccaccggcagctcaccgctacgggttaaggttgtgactttgcgttcgatatcgagaatagcagaggacggggtcgcgagttcatctgccacatggccatacagatggcccatctgggttaataactcacgcatatgtcgcgcaccaccgccggaagcggcctggtaggttgcaacggacacccaatcaacaagatcattggcgaataaaccacccaagctcatcaacatcaggcttacggtacagttaccgccaacaaaagtcctgatgccattatttaatccgtcggtaatgacgtcctgattgacggggtcaagaatgatgatggcgtcatctttcatgcgcagagagcttgctgcgtcaatccagtaaccttgccatccgctttcacgaagctttggatagatttcgttggtataatcgccgccctgacaggtcacaatgatatcgagggcctttagcgcctccagatcaaaggcatcctgaagtgtgccagtggttccgccaaaagacggcgcagcctggccaagctgagaagtagaaaagaagacagggcgaatggcgtcgaagtcgcgctcttcaaccatgcgttgcatgagaacggagccgaccataccgcgccagccgataaaaccaacatttttcataagcgtttttttcctgcaaagatgtgtgctgtataaatgtgccggtctcctcttggcacatctttcaccatacaaaaagcagccaaagtcgcaagtgaaattaatcaatgatagcgaagccatcagtaatgcgacttatcctgctttgttagcacgcagaaagtccgcggcaattatcagggaatttgagttatgaatgaaatcatttctgcagcagttttattgatcctgattatggatccgctcggaaacctacctattttcatgtccgtactgaaacatactgaaccgaaaagacggcgggcaatcatggtgcgagagttgcttattgctctcctggtgatgctggtgttcctgtttgcgggtgagaaaattctggcatttcttagcctacgagcagaaaccgtctccatttctggcggcatcattctgtttctgatcgccattaaaatgattttccccagcgctagtggaaatagcagcgggcttccggcaggtgaagagccatttatcgtgccgttggcaattccgttagtcgccgggccgactattctcgccacgctgatgttgttgtctcatcagtacccgaatcagatggggcatctggtgattgctctgctgctggcctggggcggcacctttgtcatcctgctacagtctagcctatttttacgtctgctgggcgagaaaggggtgaacgcacttgaacgcctgatgggattgattctggtgatgatggcaacccagatgttcctcgacggcattcgaatgtggatgaaggggtaacgaggagagtttttcgaaaagaacccggtagcgtcacaactaccgggcgaacaaacttaactcaacagctggaacgcaatcatcccaacgatggcaccgacagtgccgaggatggtttccatcatggtccaggttttcagcgtttcggcttcggtcgcgccggtaaatttaccgaacaaccagaaaccggcgtcgttaacgtggctgacaacaatgctaccaccagcgatacaaatgctcagcgccgccatttgcgcaccggagtagttcagttgttcaataaccggcatcaccagtcctaccgccgttaaacaggctacggtggcagaaccctgaatgatgcgcactgcagctgccagcacgaagcaggtgatagcaatcggcaggcccatgccggttaacgcttcgcccagtgccggacctacgccagagtcaaccagcacctgtttgaacacgccgcccgcaccaatcaccagcagaatgatccccgccggttgcagcgcgtgaccgcaaatctccatcactttgtcttttggcatgccctgacgcattgccagaccgtaaatcgccaccagacaagcaaccagaatcgcggtaaacggatgaccgataaactcaaaccattcgtaagcagtacttccttccggcacaaaacgcgcggcaatggttttcagccctaccagcaccagcggcagcaggatcaggctcaggctgaatccgaaagatggcattttgccttcgccgagatgcggttcgctgatgtcgtcaggaatatgcagctcaacgtaacggctgatgaagttaccccacagcggcccggcaataatcattcccggaattgccgcacacaggccaatcaggatcatccagccaaagtcggcattcatctggcttgccagcagcatcggcgctggtccaggcaccagaaatgccgccgctgccgccacgcctgcaaataatgggattaccagcttcaccaggttcgtaccggtgtggcgcgccatactgaaagcaacgctaatcagcagaactatcgccacttcaaagaacagcggtagcgcacagaccagccccgcaaggccgatggcataatgcgcgcggctgtgaccgaaggatttgagcattttgacggcaatctgatcgactgcgccggtttcatgtaagatcttgccaaacatagctcccagggcgacaaccaccgccaggaagccgagggtgcctcccatccctttttccatcgtcgctgcgattttatcgagcggcataccagaaaaaaggccagcccccatggacaccaccattaaagccaggaaagcgtgcatacgcgccttcatgactaaaaacagcagcagtaaaacagaccctactgctgttaaaacaagcgttaatgtagtcactacttatttgccttttttaataacctcaatggtgcttgccacaacaccttccagcggttgatcgatatccaccaccagtacatcggtttcgtccgcacccggctcctgcagcgtttcaaactgcgtcaccaacatttgggttttaaagaaatggcctttgcgcgctttcaggcggatttcaatcacatcaaaatcgcctttcaaatagatgaaagagagattcggattaccttcacgcagcaagtcgcgatagtgttttttcaatgcagaacagacgatcaggctcactttattagtgcgctgcatagcaaacgcggcgtcgttcagcgcctgcaaccacggtttgcgatcgtcgtcattcagtggttcgccagacgccattttttcgatattgcgccgtggatggaggaaatcgccatcaagaaacgcggcatgaagttgatgcgccacttcactggcgaccgcagatttgccgctgccgcttacgcccatcaagacgtaaatgtggtgatcatggttagtcgtgctcaaagtggtgcccccacaatacaagaattaaaaatgttacgggtaactgttatcggtaacattgtccagccggacaatatcagaagcaatatccatccatgccttaagtgtataagtgtgagctacttcaaatttgtgggcttaaatagatccgcccggactcaaggtgaaacctaaatctaacattttcggtgtcacagattcgccacgaatacgcgccagcaggcgttcagcgccaatactgcccatccgctcacgcggcgtcagcacgctcgcaagtcgtggctccatcacctgaccaatgtcatgaccgtggaaaccggcaatcgccatatcgtcaggaacttttaaccccagacgctgacattcaaacgccgcgccgaccgccaggtcatcattcgtacagaacacgccatccagctgcggatattcccgccgcgcctggcgaatcagttcaataccggaagagtaagaagaagattgctcaaccatcacgctatatggcaccaggcctgcatccagcatcgcctgttcgtatcccttctgtttgatgatagtacgttcgtcgagacgtgcgccgagataggcaatgtggcgatgcccgcgagcaataatggcagtggtcatctggcgtgctgcttcaaagttatcaaaaccgacggcgatatcaaggcatgggctcttgctgtccatcagttccaccacgggaatacccgccacttcaatcatctttaaggtgcgcggcgtgtgggtacgttcggtgaggatcaggccgtcgatattccaggagagcatggattcgaggcgttcttgctccatttccggtttataaccgtagtgcgccagcatggtctgataaccgtgcgcgtcggtgacgctttcgattccgcgtaatacttccgcgaaaacctggttggtgagagaaggtaacaggacgccaatcgcccggctggtggcgttagagaggatatcgggcgcacgattgggaatatagcccagttcatcaagagccgcggcaatcttgccgcgtagagcgacggaaacctgctccgggttgcgtaaaaaacggctgaccgtcattttggtcacgcctacacggtcagccacatcctgaagtacgggtcttttctttttcatcgtcctgaaggtacaaaagagatagattctcttagtttaacacggacacatcagaaccttcccggggaaaacagtgcttgtttacaattattagatatacactaaatcaattgcatcgcattgtgctaacgacgcggcaaaaccccggaagcgtacatcagcacgcgaccggagcgagcgaggaagcctgcaaaaaggcaggcttcaaagatgccgttgagttttaaaccggcggcagatcgaacagtaacacttcgctgtcgctatccgcatggatggagattgcctgctcatcccagattgccagaccatcgctggtgctggctttcacgccgttaatggtgacattgcctttcaccacctggatccagacgcggcgttcagcggcaatctgatgcacgctctgctcatctttcagcaacgcccagcggtacagttccatatcctgatgcactttcaaactaccatctcgcgcatccgggctgagcaccagctgtttgccctgtacggcatcgaagcgacgctgttcataacgcggcgtaataccgttttcttcaggcatgatccagatctgatacagatgcagacgctcggtgctgcttgggttgtactcactgtgacgaatacccgtaccagcactcataatctggaactcacccgccggaacctgctctttattgcccatgctgtcctgatgctcaacagtaccttccagcacgtaggtcaaaatttccatatctttatgcgggtgagtgccgaagccctgccctgcttcaatcacgtcgtcgttaatcacgcgcagcgcggagaagcccataaagttcggatcgtaatagttggcaaaagagaaagtatgccaggagtccagccagccatgatttgcatgaccacgttcatttgctttgcgtaagtagatcatttgtattcgccccctgaatgatttcgatgggcttagtgtggacccgatctgcctgggatgatagagggtgaaaattgacccctctgttcaaaaaaattgaactattcgaggggccatcaaacttacttagcgagagttactgtggagggagaggcttgctcaaatccgcgttcaaggatttccagattggtaagaacttcagattccttgacgtaatttggcgcaccgtgggtgatggtttgatacaacgcatcataaacgcgcccgtaatcgcccatctccggcttcatctcttctctgaccgtcacgccctcgtcattgacatactccagcacaccgacgctatcatccgctgcgaatcccggttcgcccggcataatattagccttcaggctggtttcctgctggtcgataccgtatttaataaagctacctttcttaccgtgaacgataaatttcggataatcgattttcaccagatggctggttttgacgatggctttcaggtcgccataaaacagttgcgcttcaaaggtgtcgtcaggattggctttattacgcaggctgcggatgtcataagcgacgtgatccgggcgaccgaacagagaaataatctggtccatcgtatgcacaccaaggccataaaacgcgccatcctgcggcagcccaggtttggtttctgccaccgggcggtaatagtcaaaatggctttccacttcaacaatctctcccaacttgccactttcaatcgcttttttcgctgtcaggaagcaggagtcaaagcgacgattctgatacggcgtgacggtcagccctttgcttttcgccaacgcaaacagctctttcgcctgcgcaagtgtcggagtgaacggtttttcgaccagcacatttttcccggcttccagcgcgcgtttcgcgtactcgaaatggctgtccgcgtgggtgcagacaacaaccagcttaacatcgggatcgtttagtacttcgtcgagatcgctggtgaaatggatatgggaataaatgggagcctgttcttccggcttcgcatggcgacgaaaaatatgcgcgacatgccagctatccttgcggttaagtacatacggcagatggtaacgggtggtgcttttgccgaagccaataaaggcgcagttgatgaccatgatttcgtcctttttaaggtggttatttacaccttagcgcaaagcggacgtggttcctactggagtgcgcataacgaacacaagcactcccgtggataaattgagaacgaaagatcaaaaaaaaagccagcacccggctggctaagtaatactggaagcaatgtgagcaatgtcgtgctttcaggttctccgcgagggtcttcctgatcgcgagacaataataatcattctcattcgcacttgtccaacactttttgcaaaaaaatgcatttgactcgcatttgaaagtcaatgatgttgaaagggacatttaccccaaagaggacaaaggaacaaatgctcttcccacgaagagggccgctaaccttagtaccccgccgttaaatcatccacgctgcgcgggtcggatgcgccgtacaactcaccgtccggcccaaccataatgctttgtgtactgcccatcgcctctttcagcgccactttctgaccttttgcttccagcagcttgagcgtatccgggctaaaccctttttcgacacgcagctcgtccggcaaccactgatggtggaaacgcggcgcattggtcgcttcggcgacgttcaagccataatcgatgctattcaccaccatttgcagcactgtagtgatgatccggctaccgcctgggctaccggtaaccagccaggttttaccgtctttcaccacaatggtcgggctcatgctgctcagcgggcgtttgttcggcccgacggcgttggcatcaccgcccaccagcccgtaaacgttcggtacgcccggtttggcggagaaatcatccatctggttattaagcagaataccgctctcgcccgcgacaatgcccgtaccgaaggtggtgttcagcgtataggtcaccgccaccgcgttaccatctttatccaccacactgtaatgggtagtttgattactctcataaggcgcaagcttgccggggcgaatttcgctggatggcttcgctttattgatatcaatttgatcggcaatagatttggcataggctttattggtcagcgcctgccacggtactttgacaaaatccgggtcgccaagatattcgctgcggtcggcgtaggcgtatttctccgcttctgccatgatttgcatcgcatcggcgctgccaaagccgtatttcttcatatcgaagttttccagaatattgaggatttgtacgatatggatcccgccggaggatggcggtggcatggagtaaacctgatacccgcgataatcgccgcttatcggagtgcgttcgaccgctttataggctgctaaatcttctttagtgatcaagccaccgtttttctgcatctcctgggcgatctgttccgcaatcgtgcctttatagaattcgtccgggccgttttcagcaatcatctccaggctctttgccaggttcgcctgcaccagcgtgtcgccctttttcagcggctcgccctctttccagaagatagctttactgttttcgtgattcggcaacacttcgctaccgtaggttttgagatcgtcagccagcgcgtcgttaacgataaaaccatcgcgtgccagtttaaacgcgggctgcacgactttgttcagcggcatggtgccgtatttatccagcgccaggctgaaacctgctaccgtacccggtgtgccggaagccagatggctagtgagactttttttgctgtccgggttgccctgatcatcgaggaacatatcgcgggtcgctttggcgggtgccatttcgcggaaatcgatagccgtggtattgccatttttgctgcggattaacataaaaccaccaccgcccagattccctgcctgcggatgcgttaccgccagcgcgtagcccaccgccacggcggcatcaacggcattcccgccctccttgagaatatccacccccacctgagtggcagtggcgtccacagacgctaccattccctgtttcgcgcgtaccgggtggaagacatcttcctccacaccatagctgacgggcggcgcaggaggcgcggcggcggcgctaaaacaacttccactgagcagagcagcaatggccacccggcgtaaaaacgtcggttttatcatcgttattctccagagattaaggggcaaccccagctaagcctggtatataactctgaattaatcatcgttttgtcgggaagcgagtaaacttaaaggatatcttcagaggaggatacgcgatgaaacgacttctgattcttacggcactcctgccgtttgtcggctttgcacagcccattaatactctgaacaaccctaaccagccggggtatcagatacccagccagcagcggatgcaaacccagatgcagactcagcaaatccagcaaaaagggatgctgaatcagcaactgaaaacgcaaactcagttgcaacagcagcatttagaaaaccagataaacaataattctcagcgggtgttgcagagtcagccgggggagcgaaatcccgcccggcagcaaatgctgcccaacaccaacggcgggatgttaaacagcaaccgtaatccggatagtagcttgaatcagcagcatatgctgccggagaggagaaacggcgacatgctgaatcagcccagcacgccgcagcctgacattccgttgaaaactattgggccgtaattattgggccgtaaagttcggaccaatcacgtcaatcgcatcggtacagatgcaatccacaccccagcgcagcaactctgctgcgcgctggggtttattgacggtataaaccagaatccgcagtccggcgtctttcaactgcatcactcgcgctttattgagtaacttatgattgagatgaatagagacgcagcccagccgcgcggtcagttcgcgccagtcgtcgcgccactcatccagcaacaaaccgcgcggcagttccggtgccgcctgttgtgcagcttctaaagcatcaatctcaaagctactcagcagcggcggcgtcataccggcccacagctcgcgtgccgccagcgccaccattttgcccgttaatggcccggtgccggtggtgggtttgatttcgatattcgccatcatcccgtgttcgcggcaacgttccgccacctggctaagcaacggtagcggctcacctttaaacattttgctgtaccaactgcccgcatccacgcgcagtaaatcctgccagttcagttcacccgcgacgccccagccgttgctggtacgttcgagattgtcgtcatggagcaggaagatctcgccatctttgcttaacttcgcgtcaaattcgatcatcttatgaccgtattttgccccgacgtcgatactcgccagggtgttttccggggccagcttaccgccgccacgatgagcgacgatgcggggataaggccagttactcatactcgttgtcctgtttcaccatcaaaaagatgcagctgattttccgccagatgcagccacagcgtgctgcctgccgtcgggcgctcctgatgcgccagtcgcaccaccagcttctgctcgccccagcgtccgtgcgccaggttatctgcgccgaggatctccagcgtgtccatcaccatcggtacgccgccttctgcctggctgcttagcgcaatatgttccgggcgaatgccgagagtcattttacgcccggcatactgacggtagccaccgtttagcggcagctcaataccgccgtccagttcgaaatgcgtgccttcgttattcacgcggcctgtcagcaggttcatcgccggactgccgataaaactcgctacaaacaggctggcgggcttttcgtagacttcaactggtgtgccaatctgttcggcaacaccgccgttcatcaccattactcgctgggcgagcgtcatcgcttcaacctgatcgtgagtaacgtagagactagtcgttttcaggcgacggtgcaactgttgcagttcaagacgcatctgcacgcgcagcttggcatcgaggttagagagcggctcatcaaacaggaacaccgccggatcgcgcacaatcgcgcggcccatcgccacacgctggcgctgaccgccggaaagctcgcgcgggcgacgtttgagcagaccgtccagctccagaatgcgcgccgcttctttaacgcgctcggcaatttgctgcttgcccatgccgcgaattttcagcccccacgccatgttttcttcgacactcatatgcggataaagcgcgtagttctggaacaccatcgcaatcccgcgatcttttggctccatttcagtcacgcgctggtcgttgatccagatatcgccttctgtcacccgctccagcccggcaaccatgcgcagcagcgtgcttttcccgcagccagacggcccgaccatcacgataaattcgccatccgccacatcaagggtcagcggtttaatgacctgggttttaccatcccagcttttggttactgcctgtaatttcagtcctgccatcttatttctcactatcgaccaggccgcgcacgaaggcacgctgcatcactaaaacaatcaccaccggagggataagcgttaacaacatcgccaccatcacactgttccattccgtggtgccttcgcctgtagcgatcatccctttgatccctgccacggtggtgccgagatccacatcggtaataatcaacaacggccacaaatactgattccagccgtagataaaggtgatcacaaacagcgccgccagattagttttggagagcggaaaaacgatgtcgcaaaagaagcgcattgggcttgcgccgtcgatccgcgcggcttccaccagctcatccggcagcgtcataaagaactggcggaacaggaaagtagcggtcgcgctggccatcagcggcagcgttaaaccggcgtagctgtcgagcatctgcaggttggcgatgacttccaccgtcgggaagatacgtacttcaaccggcagcatcagggtgataaaaatcatccagaagaagaggttacgtagcggaaaacgaaaccagacaatggcaaatgcgctgagcatgctgacggtaattttgccgagcgtaatgctgaacgccatcacaaagctgttaagcaacatccgccagaacggcgcgctattcgtgcctaccccgttcacccagatgttgtggatgttttccagcagatgtgtgccggggatgagcgtcatcggcgcggcatagacggcctgtttatccagcgtcgccgcgacaaacgccacgtacagcgggaagaggatcaccgcgatcccgaggatcagcatggtatggctgaatatcgtcagccacggacggttctcaatcattggtaacgcaccttgctttcaacatagcggaactgcaccaccgtcagcacgatgacgaggaacatcaacaccacgctctgtgcggcagagctagccagatccagtccggtaaaaccttcgcggtagatcttataaatcagcgtcgtggtggcctgaaccggcccgccggacgtggcggcgtcgatcaccgggaaggtgtcgaagaaggcatacaccaggttcactaccagcaggaagaaactcaccggggcgataagcggcagcgcaatcttaaagaagcggcgaatcggccctgcaccgtcgatggctgcggcttcgatcaagctacggggaatggattgcagcgcggcatagaagaacaggaagttgtagctgatttgcttccatacactggcaaacaccaccagaaacattgcctgaccgctgttttgcgcgtggttccagtcgtagccgaactccgcgagaaaatgggtgatcagcccgcgaccggggttaaacaggaagatccacaatacggcggcaacggcgggagccacggcgtaaggcagcaacattaaggtttgatagaaacggctgccgcgcacgatgtactccaccagcgccgcaaagaacaggcttaccagcaaaccgctgacggtgacaaaggtgctgaattttatcgtcgtccagaaggagtcgagatagtagctgtcatggaacagcgtgacgaagttatccaggccgacaaactggctggagaaaccaaacggatcgacgctttgtaggctgtaccacaacgcttcgcccgcaggccagataaaaaagataacggtgatgatgagctgcggcgcgaccagcagataaggcagccagcggctgcggaacaccggacgggaactactcattacggttaattcctgaactgtgccggatgcgcttcgcttatccggcctacacgcgatgccaggtcagataagcgaaacgcatccgacattacactgattaagacttcgtgcttttctcaaagcggcgcagcaactgatttccacgctcaacggcggtatccagtgcctgctgtggtgtcttcttaccggtccacacgctctccagctcttcatccacaatcacgcggatctgcggcatgttgcccagacgcagccctttggtgaacggcaacggcggcttattcagcatctgacgcgtcgcggtatccgcccctgggtttttctcataaaagccctgctcacgggtcaggtcatacgctgctttggtgattggcagataaccggttttctgatgccactcggcagcgttttctggcttcgcgaggaaatcgaggaacttcgccacaccggtatacgtttctttatctttaccctgcatcacccacaggctggctccgccgataatggcgttttgtggcgcatctttcgcatcggcgtcgtaaggcatcatgcctacgccgtagttaaatttggcgtactcgcgaatgttggcaagagaaccggaagaggcggtggtcatcgcgcaatcaccgttatagaacttctcggtggattcatccttacgaccgacgtagctgaagtcgcccttcttgttcatctcctcgagcatggcgatgtgtttcacctgctccggcttattgaactccagcaccgcgtccgtgccgtcaaagccgttgtttttgctggcaaacggcagaccgttccaggcgctaaagttttccagttggatccagccctgccagccgctggcgtagccgcacttcatgccggaggctttcagtttcgcggcatagtccgccagatcctgccaggttttcggcggctgttccgggtctaatcctgctttcttgaaggcgtctttgttgtaatagagaacgggggtgctgctgttgaatggctgggagagtaagtggcccgttttgctgtcggagtagtaaccactaaccgtcggcacaaactggctctcatcgaactgaatccctgcctctttaaacacgtcatacaccggtttaatggctttgctcgccatcatggtggcggtgccaacttcataaacctgcaaaatagccggcgcgttgccggtacgaaatgcggcaatccccgcgcttaaattctgttcgtagttgcctttataggtcggtacaattttgtaatccgggttttcggcgttaaaacgttgggccagagaatccacctctttacccagttccccttccatagaatgccagaacggaatggtcgtcactgcctgtgcattccccattaacgccagtccgagcgccagtgcactagctgtataatgtaacggtttcatcgtttatctctcttgttgtaccgaatgcgcgaattcacgcgttttatgctcgcggggtaacatgacatgctcgaattacagaaaaataacttttttgttacatttgtaagatagtaaggtgtcagaaagatgacaaggcggtgacggcgtgggtgagggaaaatgggagatggggcacggataagcgggaaaatatagaaggtctgaatcaaactctacagattgctcatcgtttcatgccggatgcggcgtaaacgccttatcaggcctacaagatcgtgcaaattcaacatattgccactcacccagtaggcctgataagcgcagcgcatcaggcaattttacatttgtcacctgtctcaaaggagtcttttgactccctatcaatcaacgtgttattacccgcctaaatacgcacttctcaccgcttcattcgccagcagcgcatcaccagtatcggaaagcactacatggccgttttccagcacgtagccgcgatccgccagctttagcgcctggttggcgttctgctcgacgagaaagatagtcatcccctgctcgcgcagctgctcgatggtgtcgaaaatttgctggatgataatcggcgcaagaccgaggcttggctcatcaagcagtagcaaacgcgggttgctcatcagcgcacgaccaatcgccagcatctgctgttcaccgccggacatggtgcccgcccgctgaatacggcgctcatgcagacgtggaaacagctcatacacccactttatgcgctcctggaactggtcgcgttcagcaaaaaaaccgcccatcgccaggttctcttccaccgtcatccggctgaagacgcgacgcccttccgggacaatcgccaccgcttcgcgcatgattttcgctgtctgccagtcggtaatgtctttatcatcaaacacaattcgcccgctggtggcacgcggatcgccgcataacgtgccgagcaaggtggttttccccgccccgttcgcgccaatcagcgtgacaatctcgccctgattgatatgcaggctcacctcatgcagcgcctggattttgccgtagtgggcgctgactttgtcaaaggacaacatgactttttccatcttatgcctcacctaaataggcacggatcacgtccgggttattacggatctgctccggcgtaccgtttgccagcggcgtcccctgattgaccacgtaaattcggtcgctaattcccatcaccagcttcatatcgtgttcaatcaacaagatagtggtgttgtgatgattgcgcagttcggcaatcagctcatccagctctttcgtctctttcgggttaagacctgccgcaggttcgtcgagcattaaaatctccggctgcgtcaccatgcagcgggcaatctcaagacggcgctggtcaccataggccaggttactcgcctgacggttggcgtgttccagcaaaccaatgcgctcaagccaggtcgcggcgcggtcgagcgcttcgctctgggcgcgacggaaggatggcgttttcaacaggccagagaacagcccggttttcagttgctgatgctgcgccaccagcaggttttcaattaccgtcatttcacggaacagacgcacatgctggaaggtgcgcaccacgcccatgcgggcaatttgctgccccggtaaaccttccaggtgctgatcgcgcagtaaaatggtgccgccggtgggtttgtagaatccggtcagacagttaaaaaccgtggtttttccggcaccgttagggccgattaagctgacgatctcctgcgggtacagttcaagattgacgttgttcaccgccagcaggccgccgaagcgcatcatcaggccgttaacagataataatggctgactcatgcctgctctcctttcgctgcgccgtttttcagcttcagttgcgggcgcgtcatgggcagcaagccctgcggacgccagatcatcatcagcaccatcaaaccaccgagcattaacatgctgtattcgttgaaatcacgcatcaactcgcggctcaccaccagcaaaattgccgccagaatcaccgcaaattggctgcccataccgccgagcaccactatcgccagcacaaacgcgctttcggcaaaggtgaaggattccgggctgacaaagccctgacgcgccgcaaacagcgttccggcaaaaccggcaaacgcggcacttatggtaaaggcagtcagcttgatacgacgcgggcttaagcccaggctacggcaggcgatttcatcttcacgcaacgcttcccacgcacgccccagcggcatccgcagcaggcggttaatgacaaacaggcttagcaccaccagcagcaacgccaccaggtagaggaagatgacacgatcggagggatcgtatttcaggccaaagaaattactgaacgtgtcccagccgccttcacgagcggtacggctgaactcgagtccgaagagtgtcggtttcgggatctgactgattccgttcgggccgccggtaatttcggtgttattgagcagcaatatgcgcacaatttcgccgaaaccgagggtaacgatcgccagatagtcaccgcgcaaacgcagcaccggaaaaccgagcaggaagcccgccgccgctgccattaatccagcaatcggcaggcaggtccagaagcccaagccgtaatagtgattgagcagcgcaaaagtgtaagcgccgatggcgtaaaaaccgccgtaccccagcaccagcagaccagaaagaccaacaaccacgttcagcccgagaccgaggataatgtagatcatggtcagggtggcaatatccaccgtcccgcgactaaccataaacggccacgccaccgcaagcaccaacagcgccacgaggaacagtttctgcttcaccgtggagccatcaatggcgggcagaataaacttcggtccggaaacgcttttcaaccctttctggaaagccggtcgcaaaagctggaagaaaaagaccaccgccgtgccgataaacacccactgccaacggacatcgctagccgtgtcgaccaccagtttggtgccatccagctccagttgcacgcccataaagacgcccgccagcacaaagaacatcgcggcagagagcagcgccattgcaatatgcatcggtttcatactttctctacctccgggcgacccagaataccggtcggcatcaccagcagcaccagaatcagcagggcgaaactgaccacatctttatattccgtactcagataggcagaagagagcgcctccgcaatccccagaatcaggccgccaatcatcgctcccggaatgctgccaatcccaccgagcaccgccgcggtaaaggctttcatcccggccataaagccgatgtaggggttaatgacgccgtagaactgaccgagcagcacacccgccaccgccgccatcgccgcgccaatcacaaaggtcagcgcaatcacccggtcggtgttaatgccaagcagactcgccattttcagatcttccgcgcaggcacgacacgcgcgacccatgcgggaatagcgaatgaaaatcgtcagcgccagcatggcgaggaaggtaacaatccagatcaccgcctgcatggtggtaatagaggcagagaagttttcgctatgccccaccacccactgaccgttaaacaggctcggcagcgccacgtcgcggctaccttcggtcaggctgacgtagttttgcaggaagatggacataccgattgcagagatgagtgcaatcaggcgcttagagttacgcaccgggcggtaagccacccgttcgatactccagccgtaggcgctggcaatgacgattgcgccgacgaatcccgcagctaccagcagccagccggtatcaatgcccatcatcatcagcgcggcgatgatcataaaactgacgtagctgccaatcatataaacctcgccgtgggcgaagttgatcatgccgataatgccgtaaaccatggtgtagccgatggctatcagcgcgtaggtactgcccagcgtgacgccgttaaacatctgctgcaagaaatacaaaaactgctcagacataaggtaacctttctaaacccgcccgcattttacgggcggtgggatgatcacttggctgccgtggaactaccgtcggcgtgccactggaagacaccaaaatcaaatcccttaagatcgcctttttcatcccagttcagcggcccaatcacggtgtttgcaccgttagcttttaaatctttcaccagcgccagcggctcatcgctgccggtacgctcaagggcagtcgccagagattgcaccgccgcgtaggtgatccagacataaggcccggacggatctttcttgtctgctttcagcgcatcaacgatgccctggtttgccggatcctggtcatagcgttttggcatagtgaccaacatgccttcggcggcatcaccggcaatgttgctcaagctcgcattacccacaccttccggccccataaactgggttttcaggccaacggaacgggcctggcgcagcatctgccccatttccgggtagtaaccgccgtagtaaacgaagtcgatgttttcttttttcaggcgggcgatcagcgcggagaaatctttctccccggcggtaataccgtcgaagaagacgacgttggcgttagccgctttcagcccgtcctgcacgctacgcgccagcccttcgccatactgttgtttgtcgtgaatgatggcgatgcgctggggcttcaccgtctcaagaatgtattttgccgccgttggcccctgggaagagtccagcccggcagtacgcataatgtgttgataaccgcgttgggtcagctccgggttggtcgctcccgggctgatcatcagaataccttcgtcttcatagatatcactcgcaggctgggtagaagaagaacacagatgaccaataacgtatttaatgccgtcattaacgattttgttggcgaccgcaacggcttgtttcgggtcgcatgcgtcgtcatattccacgccaaccagtttatcgcccttaattccccctttggcattaatgtctttaattgcctgacgcgcgccgttaaattccatatcgccccactgggcaatcgggccggacatcgcgccgacaacggcgactttaatatcgtcagccatagcggtgtgactaattgccagtgcaatcatccctgcgatgatagttttcgcattccgtttcatagtcaaaaatccccattcgtgatgttgtgttgctttgtttttatgtgttaacaaatcagactgttctttttttatactgcactgtttttgcctgtctgattaaggggttagcgcagtattttgtgataatagcgattaaaatccctatttttcagtcgattaagaacagataatattctgaatttattgatagataaacagaaaaaagtgcctttgtcagcataaaataacggcacaaagggcggaataattcactatcattcaggggattatgctggacatttttcattctctaatgttttaattttgtaattattgctgttaaaaaattaatcacctgccaaaagaaataaaaaagagaaagcctccgattaaattatttcgctacactggttccacttttgtgatttacacgggttacccatgaagctgaccatcattcgattagaaaaatttagcgaccaagaccggattgacctgcaaaagatctggccggagtattccccttccagcttacaggttgacgataaccaccgtatctacgccgcgcgttttaacgagcgcctgctcgctgccgtgcgggtaaccttaagcggcaccgagggagcactggattccctgcgcgtgcgggaagtcacccgccgtcgcggtgtggggcaatatctgctggaagaggttttgcgtaacaatcctggcgttagttgctggtggatggcggatgcaggcgtggaagatcgcggtgtgatgacggcgtttatgcaggcgctggggtttacggcacaacagggcggctgggagaagtgttaatcgtcaagtttgatttcaaaagtgatattgcctgatgcgctacgcttatcaggcctacaatgtgtgttgcaatttactgatttctttggatcttgtaggccggataaggcgtttacgccgcatccggcatgaagcaacgtactcgatattagcaatttggcggcaacccaaagttgccgattaatgattacttcgcatcggtcgccgtgccgttggcgtgccagtcaaatacgccgaactcaaagcctttcagatcgcctttctcatcccaggtcagcggtcccattacggtatccacggagttcgctttcaggtatttggcgatttcagccggatcgtcagactgattcaggcccgcctgcaaagattgcagcgcggcgtaggtggtccaaacgaatgcgccacttgggtcctgttttttcgctttgatcgcgtcaacaatgggtttgttcgccggaacctgatcgtagttcttcggcttggtcaccagcagcccttccgcactttcgcccgcaatgttagacaggctaacgttagccacaccttccggccccataaactgagttttcagccctgccgcgcgtgcctgacgcaggatttgccccatttccgggtgataaccgccgtagtaaacgaagtcgatattctcttttttcagacgcgccaccagcgtactgaaatctttttccccggcggtgatgccatcaaagaacaccacgtttgcattgcctttcttcaggccgtcctgcaccgctcgcgccagaccttcgccgtattgctgtttgtcgtgaacgatagcaatacgctgcggtttcactttctcaagaatatatttcgccgccgtcggcccctggtcggagtccaggccggtggtgcgcaggatcagctgatagccacgggcggtcagctccggcgcggttgccgctggggtgatcattaaaatgccttcgtcttcgtagatgtcagacgcaggctgcgtactactagaacagaggtgaccaatcacatatttaatgccgtcgttaacgactttgttcgccaccgcaaccgcctgtttcgggtcacaggcatcgtcatattttacgatttgcagtttgttgcctttaatgccgcctttagcgttgatatccgcaaccgcctgctctgcgccggtaaactcctggtcaccgtactgcgcaaccggaccggacattgcgcccacgaccgcgactttaatatcttctgccagagccatattgctgaatgccagcgcgatacatcctgccagtaacgctttaccctttatgttcatcctgagaatccccattcttctggttattacgtgtgttgtgatgttgtttttcagcactttatttcgttttatgcatgactacccgtgctttagcagcatactctgctaaaacatacccgatttttatgatattggaatagctattttgacagtttattaacaatctgcgtggggattggcgttttgccggaggggaaattgattattacagaggcccaaaaaacaaaaaccccggactctcatccagggttctctgcttaatagcggaaattacgcttcaatggcagcacgcaattttttcatcgcgttcttttccagctggcgtacacgctcagcggaaacgccgtaacggtcagccagttcctgcaacgtggacttgttgtcttcgtccagccagcgcgcacggatgatgtcctggctgcgttcgtccagaccctgcatcgcgtcggtcagacggtttgccgcctgctcttcccagttatcatcttcaatgccgtcggcaaagttagaacttttatcctgcagatagagcaccggagccatcggctggctgtcggaatcgtcgtcggaagacaggtcaaaggtcatgtcctgtgccgccatacgactttccatctcacgtacgtctttgctggttacgcccagttcacgggccaccatttcgacttcatcctggttaaaccagcccagacgctgcttggttttacgcaggttgaagaacagtttgcgctgcgctttggtggtcgcaactttgacgatacgccagttacgcagaacgtattcgtggatctctgctttgatccagtgaacggcgaaggagaccaggcgcacacccacttccgggttgaaacggcgcactgctttcatcaggccgatgttaccttcctgaatcaaatccgcctgtggcaggccatagcccgcataattacgagcaatatgaacaacaaaccgcaggtgagacaggatcagcgttttagctgcttccagatcgccatggtaatgcagcttttcagccagcgcccgctcctcgtcagcgctcaacatcggccacgcgttagctgcccggatgtaggaatccaggttgccaactggggctaaagctaaactttgcattttgtcagtcattcaaatcctctcaatcgatatcttctggcgcttcagtggtagcaacaactgtgccagagcttaagagcaacgaggttatcattcactgttttatcagaccgtgattttatccacaagttcaatgcaagcttgtgaataaattacgcacaaaatgtgacatagagatgaaataccgggaagagacaacggggtctctttccctgctacggaacccattgcagggaaagagtataacacgcttttattattcaggcgtaaagtggcgtaaatgttgtaccgtggcaagccacgctgccacccagccaatcatgctgcataccagcagcaatagcaggcattcatcgaaacttaagccattgatatcaaacttcgttccgaaaacctgtgccacttccgcaaccgcgctactcaatcgcagcaccagaatttcactcaaaattaaactcaacaatgcgccagaaaatcccagcagtgcgccaccatacaggaacgggcgcaggatgaatccatctgtcgcaccaatcagtttctgtacgttaatggagtcacggcgagcaaagatactcagacgcacactgttaccgatgacgaggaacacggccgccaccatcaacacgccgatcatcgcgctaacgcgcccgaccagcccggtcaacgccgccagacgggcaaaccagctgtcatccatccgcacttcgtcaatgccgttaatctgcgtgatacgatcacgcagcgtattcagactttccgtcccctggaaatcgagtttcgggatcaccaccgccactgccggaagcgggttttcttccagcatatccagcgcaccaccaaaaccagaccagttacggaactcacccagtgcgtcttcacgagaaagatagttcactttctccacgccttgctcggcctgcaactgtgccaccacgcccgcagcagcgtcatcgtccagcgttttttgcagataaacagtgatttgcggactcggataatactgcgtcgccgcctggttaacgtttttgtacaccatataacagacgctgggcagcgtcagagaaatggcgataaccatcaccgttaaaaacgtggcgaacggtttgcttttcagatcctgcaatgcgccgtggaaggcatagcgcacctgttcgttgaaaacgttggttttgcgatttaccggttttgggctggatttcgcgcgttttggtgcgttacgaccgccgtcgccactgccgccgacgcttttacggaagcgatcaagacgcccgccaaactgccgaatatgattgattgcatcgcgcttattcatggcccacgcctccatgcaagtgaccatcgctcagggtgagcatgcgataggaacgccggctgatcaggttgatgtcgtgcgttgccatcaatacggttaccccaacgcggttaaactcttcaaacagacgtaaaatgccttcgctcagcgcgtcgtccaggttaccagtcggttcgtccgccagcagtaccgcgggcttgttcaccaccgcgcgggcaatgccaacacgctgttgttcaccgccgctaagctgaatagggaagttcttcgctttgtccagtagcccgactttatccagcgccgcgctcacccggcgacgaatatcgtcaccgctggcaccggcgataatcagcgggatcgccacgttatcgtagacagtacggtccatcagtagatggtgatcctggaaaatcatgccaatctggcggcgcagaaacggaacttcacggtttttcagacgcgtgatgtcatggccgctaaaccagattttcccggcgctgggccgctcaatcccacagatcagcttcaggagggtacttttccctgcgccggaatgaccggtcagaaacgccatctcacccggctgcatatggaacgtaacgccctgcagcgcctgtctcccaccgagataagccttgctgacatgttcaaagcgaatcattgttaatcctctcgggcaaaaagtgcctctataaagtcgtccgccttaaacggacgcaaatcctcaatacgttcgccgacaccaatgtagcggatagggataccaaactggtcagccacgctgaaaattaccccgcctttcgccgtgccgtccagtttcgttagcgtgatgccggttaagccaacggcttcatggaacagtttggcctggcttaccgcgttctgcccggtgctggcatcaatagtcagcataacttcatgcggcgcttcaacgtcgagtttcttcatcacgcggacgattttcttcaactcttccatcaggtggcttttgttctgcaggcgtccggctgtatcggcaatcaggacgtcgatattacgcgctttagctgcctgaatggcgtcgaagataacagaggcggaatccgccccggtatgctgggcaatcaccggaatattgttgcgctgaccccagacctgaagctgttcaaccgcagctgcacggaaagtatcacccgccgccagcatcacgcttttaccctgctgctcaaactgacgcgccagcttaccaatcgtcgtggttttacccacaccgttgacgcccaccatcaggatcacaaacggcgctttgccttcaacattcagcggctcatcgactttcgccagaatctcgcccatctcttctttcagcaggccatagagcgcctcggcgtcacgaagctgcttgcgggatgcgccttccgtcagattggtgataattttacgtgtggtttccacacccacatcggcgatcaaaagctgctcttccagctcctcaaacagatcatcgtcgatttttttaccgcggaacaggctgataaatccggaaccgagattttctttggtttttaacaggctgcgtttcaggcgcgcgaaaaaaccttctttggtcggtttttcctgctcctgagcgatttcttccaccggctgctcttcttctgccggaggaaccaccatcaccgcctcttctgccgcttcggcagccagcgccgtttccagctcttcgtcggtaatttcttctttagccgcttcttcttccgccgcttcgacaatctctacggtttccgcttcagcctgccactcttctgggctaaccgcttcggcgttgacgtcttccggcaacggcagctcttcacgttcgatagccactggctccggcgtttcttctacgaccggttccggctgtgcaacgacttccgcttcaggctgcgctttttcactttcagcaacctgttcagtgacttccacaacgtcggcagcaaaagtttccgcctcggcttcagtatgcgcttgcggctgctcttcaacggcttgttcagaggccttcacaggctcttgcgcctgaacgatttcttctacaaccggttgttcattctgaacttctgtctctttttccggggtctgctctttttgaccaaagcccagccaggaaaaaaagccacgttttttttctttcgccatttgcgactacactcctcgctgttgcttcatggcacagcgttaacgctatgtacatagcagctaaaaaaatgatgaaatagtctatcacttaacttaattcacatcaccgcctgcaagtatgtgttatctggcggattgagcaatttatcatgaaaaaaccgaatcattccggcagcggccaaatccgcattattggcgggcagtggcgaggccgtaaactcccggttcctgatagcccaggtctgcgccccaccaccgaccgcgtacgcgaaacgttgtttaactggctggctccggtcattgttgacgcccaatgtctggattgcttcgccgggagcggcgcgctggggctggaagcgttaagccgctacgctgcgggggcaacgttgattgagatggatcgcgcggtttctcagcagttaattaagaatctggcgacactaaaagcaggcaatgcacgcgtggtgaacagcaacgcgatgagtttcctggcgcaaaaaggtacaccgcataatatcgtgtttgtcgatccaccgttccgccgtggcttgttagaagagacgataaatttactggaagataacggctggctggctgacgaagccctgatttatgtcgaaagcgaagtcgaaaacggtctgcccactgttccagcaaactggagtttacatcgggaaaaagtggcgggtcaggtggcttatcggctgtatcaacgcgaagcacaaggagaaagtgatgctgattaatattggtcgtttgttaatgctctgcgtttggggatttttaatcctcaacctggtgcatcccttcccacgcccgctgaatatcttcgttaacgtggcgctgatttttaccgtgctgatgcatggtatgcagctggcgctattgaaatccactttaccgaaagatggcccgcagatgaccaccgccgaaaaggtacggattttccttttcggcgtgtttgaactgctggcctggcagaagaaatttaaagttaaaaaataaccttattgttcgcctacaaagctgacaaagcgcgttcctttatagctcagcgtacctttatcgcccactgtcagggcgtggtactgctgggcgtcgaggcgaaacgtctgctccattcctccgctttgcggtttgaagcttgcctcatagcgtatactggtgcctgccggagtcacttcctgctggcggctacggcgatcgttaatcggtttttcccgcttgttgctcaccaccaccagcttttgctggagcggagccatatcattatcagctttttcccgtcgctgttgcataaaacgaaagcttgcggcgacgacaattaagccaatgataacaataaagaaaagaggtggtttgctcatctttatccctcatcggaaaatgcggaaataagcataccctgccagttatggtgttgtcatccgtccaccctcgccactaaactggaagcaagaccgtaggcattccgcttacgaaaaaataacgaattcaaggaactaagatgctttggagctttatcgctgtctgtctttccgcatggctatctgtggatgcaagctatcgtgggccaacctggcaacgctgggtgtttaaaccgttaacccttcttctcctgctgttactggcctggcaagcgccgatgttcgacgccattagctatctggtgctggcagggctgtgcgccagtctgctgggcgatgcgctaaccctgttgccacgtcaacgtctgatgtacgccatcggcgcgtttttcctcagccacctgctgtacaccatctatttcgccagtcagatgacgctctctttcttctggcctctaccactggtgctgctggttctgggtgcgctgttactggcgattatctggacgcgcctggaagagtaccgttggcctatctgcacgtttatcggcatgacgctggtgatggtgtggctggcaggtgaactgtggttcttccgtccgaccgctccggcgctctctgcgtttgttggcgctagcttgctgtttatcagtaactttgtctggctggggagccactatcgccgacgcttccgtgcggataacgcgattgctgcggcctgctactttgccggtcacttcctgatcgtccgcagcctgtatctctgataaaacttgactctggagtcgactccagagtgtatccttcggttaatgagaaaaaacttaaccggaggatgccatgagcactcctgacaatcacggcaagaaagcccctcaatttgctgcgttcaaaccgctaaccacggtacagaacgccaacgactgttgctgcgacggcgcatgttccagcacgccaactctctctgaaaacgtctccggcacccgctatagctggaaagtcagcggcatggactgcgccgcctgtgcgcgcaaggtagaaaatgccgtgcgccagcttgcaggcgtgaatcaggtgcaggtgttgttcgccaccgaaaaactggtggtcgatgccgacaatgacattcgtgcacaagttgaatctgcgctgcaaaaagcaggctattccctgcgcgatgaacaggccgccgaagaaccgcaagcaagtcgcctgaaagagaatctgccgctgattacgctaatcgtgatgatggcaatcagctggggtctggagcagttcaatcatccgttcgggcaactggcgtttatcgcgaccacgctggttgggctgtacccgattgctcgtcaggcattacggttgatcaaatccggcagctacttcgccattgaaaccttaatgagcgtagccgctattggtgcactgtttattggcgcaacggctgaagctgcgatggtgttgctgctgtttttgattggtgaacgactggaaggctgggccgccagccgcgcgcgtcagggcgttagcgcgttaatggcgctgaaaccagaaaccgccacgcgcctgcgtaagggtgagcgggaagaggtggcgattaacagcctgcgccctggcgatgtgattgaagtcgccgcaggtgggcgtttgcctgccgacggtaaactgctcagtccgtttgccagttttgatgaaagcgccctgaccggcgaatccattccggtggagcgcgcaacgggcgataaagtccctgctggtgccaccagcgtagaccgtctggtgacgttggaagtgctgagtgaaccgggagccagcgccattgaccggattctgaaactgatcgaagaagccgaagagcgtcgcgctcccattgagcggtttatcgaccgtttcagccgtatctatacgcccgcgattatggccgtcgctctgctggtgacgctggtgccaccgctgctgtttgccgccagctggcaggagtggatttataaagggctgacgctgctgctgattggctgcccgtgtgcgttagttatcagtacgcctgcggcgattacctccgggctggcggcggcagcgcgtcgtggggcgttgattaaaggcggagcggcgctggaacagctgggtcgtgttactcaggtggcgtttgataaaaccggtacgctgaccgtcggtaaaccgcgcgttaccgcgattcatccggcaacgggtattagtgaatctgaactgctgacactggcggcggcggtcgagcaaggcgcgacgcatccactggcgcaagccatcgtacgcgaagcacaggttgctgaactcgccattcccaccgccgaaagtcagcgggcgctggtcgggtctggcattgaagcgcaggttaacggtgagcgcgtattgatttgcgctgccgggaaacatcccgctgatgcatttactggtttaattaacgaactggaaagcgccgggcaaacggtagtgctggtagtacgtaacgatgacgtgcttggtgtcattgcgttacaggataccctgcgcgccgatgctgcaactgccatcagtgaactgaacgcgctgggcgtcaaaggggtgatcctcaccggcgataatccacgcgcagcggcggcaattgccggggagctggggctggagtttaaagcgggcctgttgccggaagataaagtcaaagcggtgaccgagctgaatcaacatgcgccgctggcgatggtcggtgacggtattaacgacgcgccagcgatgaaagctgccgccatcgggattgcaatgggtagcggcacagacgtggcgctggaaaccgccgacgcagcattaacccataaccacctgcgcggcctggtgcaaatgattgaactggcacgcgccactcacgccaatatccgccagaacatcactattgcgctggggctgaaagggatcttcctcgtcaccacgctgttagggatgaccgggttgtggctggcagtgctggcagatacgggggcgacggtgctggtgacagcgaatgcgttaagattgttgcgcaggagataaggcaaaccgatcgcaacattgagcgcgatcggtcccctcgcccctctggggagagggttagggtgaggggaaaaggcggcatcgaagccaatcagcccctatcaaccgcctttacgaatcaaataacgataaggcagtccatccgtctctttagcaaccagttcgtgttccataaaggtacaaaacccaggaatatcgcgggtagtggccggatcgtcggcgataatcagcaacgtttcgccaggctgcatattgcgcacggttttgcgcaccatcatcaccggttccgggcagcgcaggccaagcgcgtcgagtgtgtggtcagggctggaaaagagatcggtcattttcttctcatcacttaaaaaaacggcgctagtttacgccctgtgagtccgtaagcaaactaggttaacgattgcgtgaaaattaaccattgcattgtcaacgtaaagcagtatcatgcggcggctcgaaaaaagggtaagcacgttattatgttaaggtaacagacgtgtcgtacgtattgggttccctcaccccaatggttaatcaaaaaggtacaatatgaacgttttcagccaaactcaacgctataaggcgttgttctggttaagcttatttcatctgctggtgatcacctccagtaactatctggttcagcttcccgtctccattttgggtttccataccacctggggcgcgtttagctttccgtttatttttcttgctaccgacctgaccgtgcgtatttttggcgcaccgctggcccgacgcattatcttcgcggtaatgatccctgcgttattaatctcctacgtcatcagcagcctattctatatgggttcctggcagggattcggcgcactcgcccacttcaacctgtttgtcgcccgtatcgccaccgccagtttcatggcctacgcgctggggcaaatcctcgacgtgcacgtttttaaccgcctgcgtcagagtcgccgctggtggctggcaccgacagcgtccacactgttcggtaacgtcagcgacacgctggcctttttcttcattgccttctggcgtagcccggatgcctttatggctgaacactggatggaaatcgcgctggtcgattactgtttcaaagtgttaatcagtatcgttttcttcctgccaatgtatggcgtattactcaatatgctgttgaaaagactggcagataaatccgaaatcaacgctttgcaggcgagttaaaggttcgttatcagagttgtgataagatggatgaatgagccgttatggccgtttatcgaaaggaagaagtcaatgcgcaatctggttaaatatgtcggaattggcctgctggttatggggcttgcggcctgtgatgataaagacactaacgctacggcgcagggtagcgtcgcggaaagtaacgctaccgggaatcccgtcaacctgcttgatggcaagttaagtttcagcctgccagcggatatgaccgaccagagcggtaagctgggaacgcaggccaataacatgcatgtctggtccgacgccaccgggcagaaagcagtcatcgtcatcatgggcgatgatccgaaagaagatctggcggtgctggcgaagcgtctggaagatcagcaacgtagccgcgatccgcagctgcaagtggtaaccaataaagccattgagctgaaaggtcacaaaatgcagcagttagacagtattatctccgcgaaaggccagacggcgtactcttccgttattctgggtaacgtgggtaatcaactgctgaccatgcaaattacgctgcccgctgacgatcagcaaaaagcgcagaccaccgcagaaaacatcattaatacgctggttattcagtaagttttaagaactactggcggcctcagggacgtgttccggaggccgtttttttaatcgccacgtcagtaataacgcgattgcgaccagtcccgccgccgccagataaatcaccggtacgcccgcccagctcatcaccagcccagccagtggtccagtcacgccaaggcttaaatccataaatacggtgtaagttgccagcgccgccccctgattttgctgcggaaccgcttttaccgccactacacccaatgccgggaacaccaggctaaacccggcccccgccagtaagacgccgattttcgccatccacggcatagtcgccacgccaaccagtagcaggccgattatctcaacgctaaagcaaatcatcgctacgtttaagccaccgatacggttaatgccgttagggaataacaaacgcgtaccgacaaacgcacagctaaacagcgtcagcgcgaaagccgcaccgtcccaacctttagcgtcataaaacagcgtgataaaggtggcgatgacgccaaatccggcggaagccagtgccagcgccataccgtacagccagacgcgcccaagcaccgcgcgaaacggcagcggtttgcctttactggcttttaccgtcggacgcgggatcgccaacaaaatggccaccagcgccacgcccataatgattaacgctaacgcctgcaagccgccccagtgataaaacacgacgcctaacggcgcacccatcgccatcgccccgtaagtgacaatgccgttccagctaatcacccgcccgatatgcaggctgccaaccacgccaacgccccatagggtgcttcccgttccggcaaaactttgcccaatcccaaggatgacgcgccccaggcaaagtaataacaggctgatgacaggcagactggcggttaatcctgccgtcagataccccagaccgctcaaaaagcagccgcataaaccgaagacgacaatctttttgggtcccaggctatcggcgtaacgtccggcatgagggcggctcagcaaggtggcgaaatattgcaggctgataaccaatcctgcccagaaggcgctaaagcccatcacatcatggacatagcccggtaatacagcgagcggcaacccgatggtgaggtagctggcgaagttaaacatgactatagagacaatgcgcaaattcaggcgcaatccgtttagcgcgggttcggctacgggttcgggcatgaggatcaccacatttttacaacagtgtttcatttttaccacgtgctgacgtgaaaatcagcagtaagaatcagaatattgctggcgtgactcccgctacacttaatacaaaaagtcacaaggaagccccaatggaaacccctcaacccgataaaacgggcatgcacattctgctcaagctggccagcctggtagtgatcctcgcgggcattcacgcagcggcagatatcattgtgcagctgttactggcgctgttttttgccatcgtcctcaacccgctcgtcacctggtttattcgtcggggagtacaacgccccgttgccattacgattgtagtggtggtgatgctgatcgcactaaccgcgctggtcggcgtactggcggcaagctttaacgaatttatctctatgctgccgaagtttaataaggagctgacgcgcaaactttttaaattgcaggagatgttgccttttcttaatttgcatatgagcccggagcgaatgctgcagcggatggacagcgaaaaagtggttaccttcaccacagcgctaatgaccgggctttccggggcaatggcgagcgtgcttttgctggtgatgaccgtagtttttatgctgtttgaagtgcgccacgtcccttacaaaatgcgttttgcgctgaataatccacagattcacatcgcgggattacaccgcgcacttaaaggcgttagccactatcttgcattgaagacgctactcagtttatggacaggtgtcatcgtctggctggggctggagctgatgggggtgcagtttgcgctgatgtgggcagtactggcgtttttgctcaactacgtgcccaatatcggcgcggtaatttccgccgtaccgccaatgattcaggtgctgctgtttaatggtgtttacgaatgtattctggtcggcgcattgtttttagtggtccatatggtcatcggcaatattttagaaccacggatgatgggccatcgcctggggatgtccaccatggtggtatttcttagtttgttaatttggggatggctgctcggcccggtagggatgctacttagcgtgccattaaccagcgtgtgtaaaatctggatggaaaccaccaaaggcggtagcaaactggcgattttactggggccgggcagaccgaaaagtcggttaccgggatgaggcgacaagtgatacgatacgcactttcattttccattaaacgttggccctgatatgtatcggatagttctggggaaagttagcaccttaagcgcagctccactgccaccgggtttacgcgagcaagcaccgcaaggtccacgacgcgaacgctggctggcggggcgtgcattgcttagccacacgctttccccgctaccggagatcatctatggcgaacaaggcaaacctgcatttgcgccggaaatgccgctatggttcaacttaagccatagcggtgacgatatcgccctgctgttgagtgatgaaggcgaagtcggctgcgatatcgaagtgattcgcccgcgcgccaactggcgctggctggcgaacgccgtattcagcctcggggaacacgctgagatggacgccgtgcatcctgatcagcaactggaaatgttctggcgcatctggacgcgcaaagaagccatcgttaaacagcgtggcggcagcgcctggcaaatcgtcagcgtagacagcacctatcactccagcctgagtgtcagccattgtcagcttgaaaatttaagccttgcgatctgcacccctactccctttacgctcaccgccgacagtgtgcaatggatcgatagtgttaactgatccgcccacccgactgcccatctattgatccagaacaggtaatcagtatgacgaatacttaaaatcgtcatacttatttccgccatctattttaatccattggggttaccatgctctccacactccgccgcactctatttgcgctgctggcttgtgcgtcttttatcgtccatgccgctgcaccagatgaaatcaccaccgcctggccggtgaatgtcgggccactaaacccgcacctttacacgcctaaccagatgttcgcccagagcatggtttatgaaccattggtgaaatatcaggcagacggtagcgtgatcccgtggctggcaaaaagctggactcatagtgaagatggtaaaacctggaccttcaccctgcgtgatgacgtgaaattctccaacggtgaaccgttcgatgccgaggcggcggcagaaaacttccgcgcagtgctcgataaccgtcaacgtcacgcctggctggagctggcaaaccagattgttgatgttaaagcactcagtaaaacagagctgcaaattaccctgaaaagcgcctactatcctttcctgcaagaactggccctgccccgtcctttccgttttatcgctcccagccagtttaaaaaccatgaaaccatgaacggaattaaagcgccgattggcaccggaccgtggattttgcaggaaagcaaactgaatcagtacgatgtcttcgtccgtaacgaaaactactggggcgaaaagccagcgattaaaaagatcacctttaacgtcatcccggacccgactacccgcgcggtggcgtttgaaactggcgatatcgacctgctgtacggaaacgaagggttattaccgctcgataccttcgcccgctttagccagaatccggcttaccacacccaactgagtcagccgatcgaaaccgtgatgctggcgctcaataccgccaaagcccccaccaacgagctggcagtacgtgaagctcttaattacgcggtaaacaaaaaaagcctgattgataacgcgttgtatggcacccagcaggtcgccgacaccctgtttgccccttctgtgccctacgccaacctcggcctgaaaccgagccagtacgatccgcaaaaagcgaaagcgttgctggaaaaagccggttggacgctgcctgcgggcaaagacatccgcgagaaaaatggtcagccgctgcgcattgaacttagcttcatcggcaccgatgcgttaagcaaaagcatggcggaaatcattcaggctgatatgcgccagattggcgcagatgtcagcctgattggcgaagaagagagcagtatctatgctcgtcagcgcgacggtcgttttggcatgattttccaccgcacctggggcgcgccatatgatccacacgccttcctcagtagtatgcgcgtaccgagtcacgctgacttccaggcacagcaaggattagccgacaaaccgctgattgataaagagatcggcgaagtgctggcgacccatgacgaaacgcaacgtcaggcgctgtatcgcgacattctgacccgtctgcatgacgaggcggtttatctgcctatcagttacatcagtatgatggtggtaagtaaaccggagctgggtaacatcccctacgcgccgatcgccaccgaaattccgttcgaacagattaaaccggtgaaaccttaatgttgcgttacgtattacgccgctttctgctgctgatcccgatggtgctcgccgccagcgtgatcatttttctgatgctgcgcctcggtaccggcgacccggcgctcgattatttgcgtctgtctaacctgccgccgacgccggagatgctggcctctacccgcaccatgctgggactggatcagccgctgtacgtccagtacggcacctggttgtggaaggcgctgcatcttgactttggtatcagtttcgccagccaacgcccggtactggacgatatgctgaacttcctgcccgccacgctggaacttgcaggtgcggcgctggtattaattctgctcacttccgtaccgctcggtatctgggcggcgcgccatcgcgaccgtctgccggatttcgccgtacgtttcatcgcgtttcttggcgtgagcatgcctaacttctggctggcgtttttactggtgatggcgtttagcgtgtatctgcaatggctacccgcgatgggttacggcggctggcagcacatcattttgcctgcggtttccattgcctttatgagcctggcgattaacgcgcgtttactgcgcgccagtatgctggacgtcgccggtcagcgtcacgtcacctgggcgcgtctgcgcggcctgaacgacaaacagaccgaacgtcgccacatcctgcgcaatgccagcctgccgatgatcaccgccgtggggatgcatatcggcgaactgattggcgggacgatgattatcgaaaacatctttgcctggccgggcgtcgggcgctatgcggtgagcgcgatttttaaccgtgactatccggtgatccagtgctttacgctgatgatggtggtggtttttgtggtctgtaatttgattgtcgatttgctcaacgccgcgctggacccgcgcattcgtcgtcatgaaggagcgcacgcgtgaactttttcctctcttcccgctggagcgtacgcctggcgctgatcattatcgccctgctggcgctgattgcgctcaccagccagtggtggctgccgtatgacccacaggcgattgatttgccgagccgcctgcttagcccggatgcgcagcactggctgggcaccgatcacttaggtcgcgatattttcagccggctgatggcagcgacccgcgtgagcctcggtagcgtaatggcctgcctgctgctggtgctgacattagggctggttattggcggcagcgccgggttgattggcgggcgcgttgatcaggccaccatgcgcgtcgccgatatgtttatgaccttcccgaccagcattctgagcttctttatggttggcgtgctcggcaccgggctgaccaacgtaattatcgccatcgccctgagccactgggcgtggtatgcacgcatggtgcgcagcctggtgattagtctacgccaacgcgagtttgtgctggcgagtcggctttccggtgcgggccatgtgcgggtgtttgtcgatcatctggcaggcgcggtgatccctagcctgctggtgctggcaacgctggatatcggccatatgatgctgcacgtcgcggggatgtctttccttggcctcggtgtgaccgcgccgaccgccgaatggggcgtgatgattaacgacgcgcgccagtatatctggacccagccgctgcaaatgttctggccggggctggcgctgtttatcagcgtgatggcctttaacctggtgggtgacgcactgcgcgatcatctggaccctcatctggtgacggagcacgcacactaatgccgcaacagattgaactacgtaatatcgcgctacaggccgcgcagccgctggtacacggtgtaagcttaaccctgcaacgcgggcgcgtgctggcgttagtcggcggtagcggcagcgggaaaagtttaacctgcgccgcaacgctgggcattttgcccgctggcgttcgccagacggcgggggaaattttagccgatggcaaaccggttagcccttgcgccctgcgcggcatcaaaattgccaccatcatgcagaacccgcgcagcgcctttaatccactgcacaccatgcacacccacgcgcgggaaacctgcctggcgttagggaaacccgccgatgacgctacgcttaccgctgccatagaagcggtggggctggaaaacgccgcgcgcgtgctgaagctgtacccgttcgagatgagcggcggcatgttgcagcgcatgatgattgcgatggcggtgctgtgtgaaagtccgtttatcatcgccgatgaaccgaccaccgaccttgacgtggtagcacaggcgcgcatcctcgatctgctggaaagcattatgcaaaaacaagcgccgggaatgctgctggtgacccatgatatgggcgttgtggcgcgtctggcggatgacgtggcggtgatgtctgacggtaagattgtcgaacagggcgatgtagaaacgctgtttaacgcccccaaacatacagtgacgcgcagcctggtttccgctcatctcgccctctacggtatggagctggcaagttgacctaatacggtatggagctggcatcatgactttacttaacatctccggcctttcccatcactatgcgcacggtggatttaacggaaaacatcaacatcaggcggtgctgaataacgtttccctgaccctgaaaagcggcgaaaccgtcgccctgctggggcgcagcggctgcgggaaaagtaccctcgcgcggttgctggtgggtttagaaagccccgcgcaggggaatattagctggcgtggcgaaccgctggcgaaactcaatcgcgcccagcgtaaagcgttccgccgcgatattcagatggtatttcaggactccatcagcgccgtgaatccgcgcaaaaccgtgcgcgagatcctgcgtgaaccgatgcgccacctgctaagtctgaaaaaatccgaacaactggcgcgcgccagcgaaatgctgaaggcggtcgatctcgatgacagcgttctcgacaaacgcccaccgcagttaagcggcggccagctccagcgcgtctgcctggctcgcgcgctggcggtcgaaccgaaactactgattctggatgaagccgtttctaaccttgatctcgtgttacaggcgggtgtcattcgcctgctgaaaaagctacaacaacagtttggcaccgcctgcctgttcatcacccacgacttacgcctggtagaacgcttttgccagcgggtaatggttatggacaacggacaaatcgtcgaaacccaggtggtgggagagaaattaaccttttcctctgacgccggacgtgtgctacaaaacgcggtattacccgcattccccgtgcgccgtcgcaccacagaaaaggtttaacgcaaatgcaacgagtcaccatcacgcttgatgacgatttactggagacgctggacagcctgagccagcgtcgtggttataacaaccgttccgaagctatccgcgacattctgcgtagcgccctggcgcaagaggccacccagcagcacggcacgcaaggtttcgcggtgctgagctatgtgtatgaacacgaaaaacgcgacttagccagccgcattgtctccacccagcatcatcaccacgacctctccgtcgccacgctgcatgtgcacatcaaccacgacgactgtctggaaatcgccgtgttgaaaggtgacatgggtgacgtgcagcattttgccgatgacgttatcgcccagcgcggcgtgcggcacgggcatttgcagtgcttgccgaaggaagattgagttacgccattgtcccaatcgtcttcctgaatcgcagcagcgcaatggtgaaaaatgcgccgccaattgccatcagcgtcagaaactgcggccagacgatttcgaatccggcaccccggtagaggatggcctgcgcgaggctaacaaagtgtgtcgtcggcatggtcagcataatgtcctgcaccatctgcggcatactttcgcgcggcgtggaaccaccggaaagcatttgcagcggcagcagcaccagaatcaccagcagccccagttgcggcatactacgcgctatcgtccccataaaaatgccgatactcgtggtggcaaacagactgagcgccacgcccagcataaacagcgggatgctgccttcaatcggtacgcccagtacacctttcaccatcagcaccaggcttaatccgcttaccaccagcaccaccagccccatgctccagatcttcgccatcatgatctcaaacggcgttatcggcatcaccagtaagtgttccaccgtgccgtgttcacgctcgcggatcagcgcgcttccggtcaatacaatcgccagcatggtaatgttgttgatgatcgccatcaccccgccaaaccacgcgggatcgaggttcgggttaaagcgcatccgggtttccaggcttaccaacggttcgctgttatcacggtagcgcgcgacaaagctgttcacttcaccgttgataatattctggatatacccattgccggtaaatgcctggctcatgcgcgtggcatcgacgttcacctgaatatccggctggcgtccggcgaggacatcacgctgaaaattaggcggaatatttatcgcgaaggtatagcgtccggcgtccagtccggcatccatctcatcggcggtgatcatctccggtggcaaaaaccacggacgatagaagctgttaacgatccggttgcttaactggctttgatccatatcggcaatggcgatcggcgcgaggttcaagcttcctggcgtaacggtcgcactgctatacacgctcaccgtaaagctgaagacaatcagcgtcagcatcgctttatcaccgagcagactgcgcaactctttgatacccagattaaaaatattgcgtaaatggcgcatcatccctcctgttttttcagcagcaggatacttaagcccatcaccagcgggatggctatcagtaacgggataaaaagttgccacaaatcagtcagatccagcgctttgctgaacgtcccgcgggcgatagtcagaaaatgactggtcgggtaaacctcgccgatccaacgtccaggcccttccaggctagctaccggatcgatcatcccggaaaactgtgtcgccgggatcaacgtgataatcgccgttccgaaaatggcggcaatctggcttttcataaaggtggagatcagcagccccattccggtggcaatgatgatatacagcagcgccgccagggtgagcgtcaggaaactgcctttatgcggtacgccaaacacaaacacgctcaggccgcagagcaggaaaaagttcagcatccccagcgcgatgtatggcaactgtttaccaagcaaaaattcactacgcgtggtgggggtcacgtaaaggttgataatgctcccaagctctttttcccgcaccacgctaagggcgcttagcatactcgggatcatcatcagcagaagcgggatcaccgccggaacaatcgctggcaggctttttacgtccgggttatagcgatagcgcgtctcaatattcatcagcccgctttggctggcgggtgtgctttgtcggctcgccacatcctgtaaccagctctggtgcatggcctgcacgtaaccttttaccgtttcagcacggctcggcatcgctccgtcgatccagacgccgagttccacaggcgtaccacgcgcgatatcgcgcccgaaattgggcgggatctcaatcgccaccgtgatatcgcccgcacgcatccgacgatcaagctcgtcataactggtgagcggcggctgttcgataaagtaacgggaaccggagaggttgagtgtccacgcctggctactgacggtctggtcgcggtcgagcaccgcaaagcgcaggttttccacatccatactgatgccgtaacccattatcagcatcaggatcaccgttcccatcagcgccagcgtgctacgtactggatcgcgtcgcagttccagcgcttcgcggcggctgtagctaaacagacggcgcaggctaaatccctgacgcggcgcgtgggtggtgtcgtgtaccacgggcggcgcttcggcttcgttgctctgccctgccgcttcctgcaaataggcgataaatgcctcttccagactggcggctccgcgtttctcaaccagttcctgcggtgtaccgctggcaagcacttttccggcgtgcatcagactgatgcggtcgcaacgttccgcttcgttcataaagtgggtggagatgaagatagtcactttgtcctggcggctgagatcgaccatcaactgccagaacatatccctcgccaccggatcgacaccagaagtaggctcatcgaggattaacatctccgggcgatgaatcaccgccaccgccaggctaagccgctggcgaatgccgagcggcaaactctccggcagaatatcttcaacgtcgttgagcttaaaacgctcgctcatttcagccactcttgcgggaatttccgcttccgggatgtgaaacaaacgggcatgtaactcaaggttttgccgcacggtgagttcgttatagaggctaaacgcctggctcatatagcccacccgacggcgggtatcgatatcttttggatcaaccggttgcccgaacagccacgcctcaccttcgctggcgggcagcagtccggtgagcattttcatggtggtggatttaccgcagccgttgctaccaagaaaaccaaaaatctccccgcgtggaatgcggaaattaacgtgatcaacggcaacgaaggaaccaaaacgcatggtcagatcgcgcgcttcgatggcaatctctgcgttttcaggttgatacggtgggatcactaccgcctgatgcgcctggcgttgcgcttgcggtaacagatttataaatgcttcttccagcgtagcgctttgcgtttgctgccgtagctcttcggcgctgccagttgccagcacttctccggcattcatcgctaccagccagtcgaagcgttcggcctcttccatataggcggtggcgaccagcacgctcatattgctctgccgctggcgaatactgtcgatcagatcccagaactgggagcgggagagcgggtcaacccccgttgttggctcatcaaggatcaacagttccgggtcgtggattaacgcgcagcacagcccaagtttttgcttcatcccgccggagagtttccctgccggacgatcgcgaaacggtgctaacccggtgctggtcagcagctcattgattcgcacttcccgctccgctttgtcgtgaccgaacaggcgagcgaaaaaatcgacgttttcatacacgctcaaggtgtggtagaggtttttgcccagcccctgcggcatccaggcgatgcgcgggcagacgtcgcggcgatgcttcgggtcgcgcatatcgccgcccagcaccatcacattgccctgttcaatgacgcgggcaccggaaatcaagctcaacaagctgctcttcccgacgccgtccgggccaatcagcccgaccatacagcgggccggaatatcgagagtgatattgttcagcgcaacggtttttccataatgctggctcacgcccgccagttgcgcgacaggcgggacgggaaccagttccagatgcgtcattgcggcaacctcaccacgaggtcgtcaggccacggaagttcttcattcacccgcacccacgctacgcccggcaaaccggttttgacatattccagatgctgctggagtaattccggtgggatacgcgctttgacgcggaacatcagtttcagccgttcatcgctggtttcgacggtttttggcgtgaactgggcgacactggcgacaaaactgatggttgcaggaatacgcagatctggcgcggcatcgaggatcagccgggcttcaccgcccagtttcagcgtgcccgcctgttcggttggcaggaagaaagtcatatagacgtcgctgagatcgaccatattcagcacccgaccgcctgccgccagcacttcgcctggctcggcaacccgatactgcacgcgtccgtcacgcggggctttcagttcgctgtcatcgatatctgcggcaatgcgccgttcagtggcttgtgccgcttcgacgcgggtttgcgcctgaatgatattggtgcgtgccgcttctatagccgctttagaagcgcttacctgagctttcgcgctttccagcgcagctcgggcgctctcagcggcggcgcgatcgtcatccagctgttgcgcagaaatagcccctcgttgggccagactacgggaacgcgtatgacgttttgctacggagtccagttctgcctggcgttgattaaccaggctctgtgcggcacgagtttcgctttgtcgttgctccagcaaagcctgcgcggcagcaacggcgctttgtgcctctttgatttgcgcgatggcttccagtcgctgttcctgcaacacgcgagtatccatcttcgccagcacttcaccttcgcgaacaaacttgccttctttcaccagaatggtgtcgatacgcccggcaattttgctggcaatatccacttccgtcgcttcaatgcgcccattactgacagcaaagccttccggcacacctgccgggcgcaacagccaccacgccacgatagccgccaccgccagtaacccgacaacccaccacgccagatggcgcttactcttatccataatcgacccgccataatccctgtaagcaaacgacgcgtgttacaactgccgccgaacgacgttcagcggattcttccatccgggataagaaggaaacggcaaatacgaccagcgcgcagagcattgagcgccaacggggaaggcttagtgaaaacgggtagtaatgttgtcatcatcagcattcctggccgtaaatgaaacacgcatactcataagtgtgatctataaaactggctgacaaaacggtatccatcctgttggatagcgtttcacgcctgttcagttgcaggaacagagcattcctttttacgttttatcaacagtctcaaccagatagtaacattaatattcatgttgtctatggttcagagctgtaacattgtgcgccttctaatcaaaggcataagtccatttctgtttttttcatgctggtaagacttccagggagtggttatctcaggccctgcaccagggttaatttggcaattatgcatgctgaacattcttccagcatgtttactgtcacgggcgttaagacctaaaactgtccccgtttcgcctatgcgttctcttccaccatttccgttatgtgcaacaacttgatttatacctaacatttgactacatgctaatagtgcttcaagtttaggtctgtaatctgtgctaacagaaaaataacgattaaaggatcgacaagagatagcccggctagttttaaactttttgccattaattatagcatgatgctttttattgataattgccgctaattcgaccggatcgagagcattggtcatttcatcaatagagactgttatcggtcctataatgtaacgttttcgctgatcatcaaaagttatcccatgatgatttgccattattttgtatttggggtcatagaaacatacaggataatcttttatcccagagtaggtatcctcatcgagtggtttcatacgcgtgaagttctgcatatagttaccattgcaattcgtttcatgatttccagctaatacatgaacattttcattgatactcattatgcgttttaacaaatcgatgataaattgatcaccacagatattgctaaatcgatcgccggtttggtcgcccagaaacgtacatggcgtcacagcgtctttattaataactaaataaggctgaagactttctaaaataatgtctcttctgttcaggatactgattattgtattaacattagtgttaagttgctcattaaagttctcccttagcaatacgttgagaacttcatcttctatattaagcaactggctaaggaaattttctccttcagccatgattcccaaatgtcccgttgcgaaaagcgcgaacaaaactgcaccgacactgccatcggtatcaccaaaataggttggtctggtacttgtgggatcaacgggtaaacaattggagaaatagattctgtcagcgaactggggttttatcattgtttcgaatttaatatcagatacattatattggcttattttccagttccagatgggtttgtagctctcagtaactgcaacatcattagcattatcatttactgtcatattattaagtaaataaacaatactgcaccaattaatatcggtattatcaagagagcaaccgtaatttttgctattaattgtcacaataaactgataattattattcctacgtagaatatgagcacgcatgccgcttagcatactatatttttcactatgatccgtttgtatggtaaaactaattttgtcatcttgaatagattgttggaaccgttctatttgccaatcatctattttttccacaacctcaccgagcattgtcctggcaatactacttatatcatcacctataccatttgcaatatacccaaacagttctttagtgaagttggtaacatgctcttgcaccatatcatttgttgcgattgtcgttgtactgtcgttagtgcctgccacagttccaattttcatattttacctcatattatttaccgcgaggaatacatagttaacattttatcttatgacatacacctcatgttcgatgggaaaataattatattttgcacaaatcattcagcctcaaagcataatatgaaatttcttatctcatagcagagaaagtccctaaagattgtagaggcgtcatcagaacatgcctctacaatcgattaagaaaacctatgaaatactggcaggattaaaaagacataccaccgtattcatggagttttaatgtagttgaaaacaactaagcccactggaataaattattttattatttttatcacgtgcttccttcagggaatttagccccataataccattatcaaattgttgattatgatctaccccgggcccatgatgcccatatttttgtctaatgtatttgctggggtcttcacctttgagtgtctccccacatatgaagatacgttcacgtgctggtctgaaatcagtagtgttatcaaaataattagcatatacaggtgtgggtttcaaagtattgcttcggattagatggaatagaggatcatccatgtgttctttatgttttttattaaaaatattggctaattcctcaggatcagtaggatttttcatctgattaaatggaacctgcaaagcacgctgacaataacatttttttcttcatctcttattattccgtgatgactggttaaaacttgcctttcactgtcataattacaaacatcgagcgttttaattaagttatacgtatcaccggcagagagtttatgatttgctagtcgtgcagtatagttaccattaaaattgatttcatgatttccagccagaacgacgacatttttattaatacggctatctttattaccctccatatttcgcatagaatttagcaaagtaaggatatatttatcaccaaaaatagtactaaatctatcgcctgtatgatccccaaggaagatacaaggggttatcgcatcgtcctttaaaaaaacatgttgatgcaactcattcaagatcatgtctctcgtatttaataaatcgtagagcactttattatttttatgtttgtatgcagaactagccatctcttcgtgttttaataattcacataataaactccaacccttttccctgatgcctatatgcccactaacgagcaatgcataaagtacagcgcctactcttccatctgtatcgccaaaataagccgtgttggcattttgtgggttaatcacaccacactgtttatagaagtctattttactaaacacagatttaacatagctatcaaacttttccttagtaaacgtctctttagagacatcccaacgccagtcaggtttgaaattaccactaagaagagtaaagaaatttctcgctatgatagaaagcccatcaactttataaattatatcacttttatctccagaggaattaataaaataataaccgcccttacactcaacagtaacggtaatgggagagcttaattttaacacatggttattgtctggtataattgtaaagataaacgtatcagtagtattgtcggcgaatctattatattcttgaatatctatagaaggttcactattataaaaccatactttctccatctggtgactacgatcatttaccttccagtgaccatgttgcaggaaatagatgatatgcaggccaaaatcgttatctatttggctatcattatccagtttatcaaattcaactatctttgcacgatgtgttttatcaaccttgccatggtgttgatgactgttaactttatcactatgcttatcttgatggctactagagatgtttctaatctgattgtcaattgctttcataaataacctgtgatatttttgaattgtttgtaacaaaataaatgatacttgtctgaaaaacagatttacgacgatataaaataataatacttatatgttcgctgattttaagcaccgagactatccggtcttttaccaaataatgaagaataatccctccctggaagataattgtaaaaaacaacagcataagaattaatcttaggataaatttttatttatcatggccttttgaacgctgaaaagtagcgctctgcaaagtaaaccccgctatagttatgctatgcatttgtctttaatgatatctcgtcattatattaacaggatgaaattatcattaatgcatatttcaatattagcagggatacctgaggagtttaaagtgaacatatatatcgggtggcttttcaaattaatccctttgattatgggcttaatttgtatcgcgttaggtggctttgtgctggaaagtagtgggcaaagcgagtatttcgtcgcgggtcatgtgctgatttctctggcggccatatgcctggcattattcactaccgcatttattatcattagccagctcacgcgcggcgttaatacgttttacaatacattgttccccattattggctatgcggggagtattatcaccatgatatggggttgggcactgttagcaggcaatgatgtgatggcagacgagtttgtcgccggccatgttattttcggcgttggtatgattgccgcctgtgtaagcacggtggcagcgagttccggtcactttctgctcattcccaaaaatgcagcggggagcaagagcgacggaacaccggtacaggcttattctagtttaatcggtaactgcctcattgccgttcccgttttactcaccctgctcggtttcatttggtctattacgctgttacgtagtgctgacataactccgcattatgtcgcgggtcacgtattgcttgggttaaccgcaatctgtgcctgtctaattggccttgttgccacaattgtccatcaaacacgtaatacgtttagtactaaagaacactggctgtggtgttattgggttatttttctcggcagtatcacggtactgcaggggatatacgtcttagtcagttccgatgcaagcgcccgactggctcccggcattattcttatttgcctcggaatgatctgttacagcatattcagtaaagtctggctactggcactggtatggagacgtacctgtagcttagccaacagaataccgatgattcccgtcttcacctgcctgttttgccttttcctggcaagctttcttgcggaaatggcgcagaccgacatgggatattttattcctagccgagttctggtcggtttgggagcggtatgctttacgttgttcagtatcgttagtatattagaagcgggttctgctaaaaaataattgcaacgtaccggataaaaccagcgttgaccatttgcgtaacgctggtttttcttaggcatcatgaaataacgcagcattaatgcatagtggttaagtataaaaaacagcaaagttactgtttttttcaacctgttcatatttcataaagatctggccactgagtgagttttcaatcacctttccatccaccttatattaagcatggagggtttcagttcacgggctcattagaaaataatcacaagataaccactatcaaaattagctcatttttaatgcgactctaataattttcatctttaggaaataggtcaggagctctttgctgcaatcaaatcctgcgcacaagcccacgcactgctccacgcccactggaagttatagccccccagccagccggtgacgtccatcacttcgccgatgaagtacagcccaggcactttgcgcgcttccatcgtccgactagagagttcgttggtgtccacgccgccgagcgtcacttcggcagtgcgatagccttcagtgccgttgggttgtacgcgccagtcggtcaatgtgctaatcagtgcctgttggtcacgcacgttgagctgttttaggctaacatccgggatttgcccgagttgctgtaagcgttcaaccaaccgcttcggtagatgaaccgccagtgtgtttttcaggctttgattcggatgtgcgttacgctgctcattcaggaaggtttcgaggtccacatccggtagcagattgatgctgacaaattcccccggttgccagtagctactaatctgcaacaccgccggtccagacaagccgcggtgggtgaagagtaagttctcacggaaaacggtgccgttttcagcggtaatcacggaaggcaccgccacgcccgccagcacctgtaactcttcgagcaacggtttatgcagagtgaatggcaccagacccgcgcgggtcggcagcacgttgaggccaaattgttcggcaatcttataaccaaacgggctcgcgcccagccccggcatactcagcccaccagtcgcgatgaccagcttttcgcaaccgacagtcatgccgttcagatcaagcgtgaagcctgtttcatccttcgccacactcagcacttcgctacgcaatctgaaggtcacattgcccttctcgcactcatccaccagcatgtcgacaatctgctgcgcggagtcatcgcagaagagttgccctaacgttttctcgtgccaggcgatgccgtgtttattgaccagatcaatgaaatcccactgggtaaaacgtgcgagtgcagacttacaaaaatgcggattctggctcagataagcgcctggttcgacataaaggttggtaaagttgcagcgcccaccgccagacataaggattttgcgccctggttttttaccattatcgatcagcagaacccggcgtcctgcctgacctgccagcgcagaacagaacatacccgccgcaccagcgcctataataatggcatcaaacctttccacgttgcgctcctcttagaaaaaacgggcgtgaattgtaaagattcctcagtggtcgcaccagcatcaatattactaaaaggaagtatttgcctgaattatataagataattattttttgagtgaaatccatacagggggcaaatcaaaaaaagtctatatttcactttgcccgcgccgcgaaagtcactgataatgcgccgcgttcatgtcctcaaaatggcgtaacgtcctatgctacatttgtttgctggcctggatttgcataccgggctgttattattgcttgcactggcttttgtgctgttctacgaagccatcaatggtttccatgacacagccaacgccgtggcaaccgttatctatacccgcgcgatgcgttctcagctcgccgtggttatggcggcggtattcaactttttgggtgttttgctgggtggtctgagtgttgcctatgccattgtgcatatgctgccgacggatctgctgcttaatatgggaagctctcatggccttgccatggtgttctctatgttgctggcggcgattatctggaacctgggtacctggtactttggtttacctgcatccagctctcatacgctgattggcgcgatcatcgggattggtttaaccaatgcgttgatgaccgggacgagtgtggtggatgcactcaatatcccgaaagtattaagtattttcggttctctgatcgtttcccctattgtcggcctggtgtttgctggcggtctgattttcttgctgcgtcgctactggagcggcaccaagaaacgcgcccgtatccacctgaccccagcggagcgtgaaaagaaagacggcaagaaaaagccgccgttctggacgcgtattgcgctgatcctttccgctatcggcgtggcgtttagccacggcgcgaacgatggtcagaaaggcattggtctggttatgttggtattgattggcgtcgcgccagcaggcttcgtggtgaacatgaatgccactggctacgaaatcacccgtacccgtgatgccatcaacaacgtcgaagcttactttgagcagcatcctgcgctgctcaaacaggctaccggtgctgatcagttagtaccggctccggaagctggcgcaacgcaacctgcggagttccactgccatccgagcaataccattaacgcgctcaaccgcctgaaaggtatgttgaccaccgatgtggaaagctacgacaagctgagccttgatcaacgtagccagatgcgccgcattatgctgtgcgtttctgacactatcgacaaagtggtgaagatgcctggcgtgagtgctgacgatcagcgcctgttgaagaaactgaagtccgacatgcttagcaccatcgagtatgcaccggtgtggatcatcatggcggtcgcgctggcgttaggtatcggtacgatgattggctggcgccgtgtggcaacgactatcggtgagaaaatcggtaagaaaggcatgacctacgctcaggggatgtctgcccagatgacggcggcagtgtctatcggcctggcgagttataccgggatgccggtttccactactcacgtactctcctcttctgtcgcggggacgatggtggtagatggtggcggcttacagcgtaaaaccgtgaccagcattctgatggcctgggtgtttacccttccggctgcggtactgctttccggcgggctgtactggctctccttgcagttcctgtaatcgtacgcaccaaaacgagcgggtcagctggcccgcttcagattgtgacatagtgcgctttgttcatgccggatgcggcgtgaacgccttatccggcctacaaaaacatgcaaattcaatagattgcagagattatgtaggcctgataagcgtagcgcatcaggcaattttgcgtttgtaatcagtctcgagcgggtcagtttactggcccgctttttttatgcgttattattgctgaagtgcttaatgccaaatcatcaatgcaatcaggctgaccaccaccagaccacacaatgcgctggtcagaataaactgccgacgcacccgctcacagcggcgaataaattcatcatcgtgatgatcgcgataacgttgggcatagatataccaaacgagacgcacctgtttgttgggttggccatgattggtaaaaaagccccctccatcaacatattgatagagcaatggatcgcagttacgcagtaccactaacaacgcgcgtagactactgaaatagcgcgccatgttaacaatgcaaacgacacataaagcccaaaataatgcgacggtgcttatcatacctcctccccggcgacctgcccgcggagttccaccccggggctaccgctcccgatacgctgccaatcagttaacaccaggtcctggagaaaccgcttttgtggtgaccaacatacgagcggctctatagatagtgtaggagatcaggttgttttttttccagaaggttaaccactatcaatatattcatgtcgaaaatttgtttatctaacgagtaagcaaggcggattgacggatcatccgggtcgctataaggtaaggatggtcttaacactgaatctttacggctgggttagccccgcgcacgtagttcgcaggacgcgggtgacgtaacggcacaagaaacgctagctggccagtcatcgacaactttatggaaggagtaacactatggcttataaacacattctcatcgcggtcgacctctccccggaaagcaaagttctggtagagaaagcagtctctatggctcgcccctacaatgcgaaagtttctctgatccacgtagatgtaaactactctgacctatacaccgggcttattgatgtgaatctgggtgatatgcagaaacgcatctctgaagagacacatcatgcactgaccgagctttccactaatgcaggctacccaatcactgaaaccctgagcggcagcggcgacctgggccaggttctggtcgatgcaatcaagaaatacgatatggatttggtggtttgtggtcaccaccaggacttctggagcaaactgatgtcttccgcacgtcagctgatcaacaccgttcacgttgatatgctgattgttccgctgcgcgacgaagaagaataatcttccctctacgacgtgttcctgaacgcccgcatatgcgggcgttttgctttttggcgcgccttgttacctgatcagcgtaaacaccttatctggcctacggtctgcgtacgcaatcaaaatccccagccaatacaacatttaacaccatcatattttccatcattagtgtgatcatctggttattttctgttgtaatagtgtattaatctattcaccgcatcaatattaagaatctctgacagatgtaaactttttcgcgcgttatcccttacgcgttcatacttttcaggatggtattggaaggttaataaatatgaatacaacaacacccatggggatgctgcagcaacctcgcccatttttcatgatcttttttgtcgagttatgggagcgattcggctactacggcgtgcagggcgtactggcggttttcttcgttaaacagcttggattcagccaagagcaggcttttgtcacttttggtgcttttgctgcgctggtctatggcctcatttccattggcggctatgtcggcgaccacctgctggggaccaaacgcaccattgttcttggagcacttgtgctggcgattggctacttcatgaccggcatgagcctacttaagcctgacctgattttcatcgccctggggactatcgctgtcggtaacggcctgtttaaagctaacccagccagcttgcttagcaagtgctatccgccgaaagatccgcggcttgatggcgcattcaccctgttctatatgagcatcaacatcggcagcttgatagcgttaagcctggcccctgtgatcgctgatagattcggttatagtgtcacctacaacctgtgcggggcggggttaattatcgcattactggtttacatcgcctgtcgtggaatggtgaaagacattggttctgaacccgacttccggccaatgagcttcagcaaactgttgtacgtgttacttggcagcgtggtgatgatcttcgtatgcgcatggctgatgcacaacgtagaagtcgccaatctggtgctgattgttctctccatcgtcgtcaccatcatcttctttcgtcaggcattcaagctggataaaaccgggcgcaataaaatgtttgtcgcctttgtcctgatgctcgaagcggtggtgttttacattctctacgcccagatgccaacaagcctgaacttctttgccatcaacaacgtgcatcatgaaattctcggtttttccatcaacccggtcagcttccaggcgcttaacccgttctgggtggtactcgccagcccaatactggcaggcatttacacgcatctgggtaacaaaggcaaagacctcagcatgccgatgaaatttactctcggcatgtttatgtgcagtctgggctttttgacggcggcagctgcgggaatgtggtttgcggatgcacaagggctgacaagcccatggtttatcgtgctggtgtacttattccagagcttaggtgaactgtttattagcgcccttggcctggcgatgattgctgccctggtgccgcagcatttgatgggctttattctcgggatgtggttcctgacgcaggctgccgcgttcttgctgggcggctatgtggcaacatttaccgcggtgccggacaacattaccgatccgcttgagacgttgcccgtctataccaacgtgtttggtaagattggtctggtcacgctgggcgttgcagtagtgatgctgttgatggtgccgtggctgaaacgcatgattgcgacgccggaaagccattaattattcttgcagaaagcagggtagcgttatcgctaccctgttttagttttacactggcgtacctgcatagatatcaaagcgatgccctttagtgactaccgcgtttggcgtggcgacattcgccagcggtggcgcgtagtccgggcgctttaccaccacgcgtttggtcgccagcaagcgtgcaggctccagtaatccatcggcatcaagatccggtcccaccaggctctgaaagacacgcatctcttttttcactagcgcgcttttctgcttatgcgggaacatcgggtcgagataaaccacctgcgggcgcggggtaatatcagtcagcgccgtcaggctggaggcgtgaattaactgcaaccgctcctgcaaccagccgccgatttccgcatccgcataaccacgcgccaggccgtcgtcgagtagcgcggcaaccactggattacgctccagcatccgcacgcggcagccgacactagccagtacaaaggcatcgcgcccaagtcctgcagtggcatccaccacatccggcaaataatcgcctttaatgcccaccgctttcgccaccgcctcaccgcgaccaccgccgaatttgcgtcggtgcgccatcgctccgccaacaaaatcaacaaagatgccgccaagttttggctcatcacgcttgcgcaattccagatgttccggcgttaacaccagcgccatcaggttgtcttcatcgtgctccagcccccagcgggccgccagaacagataaggcaccgtctccggtgcctgtttcatcaattaagcagattttcactgaatgatcagcccttaatgccgtaatgctccagcatcgcatccagctgcggttcacgaccacggaagcgtttgaacagatccatcggctcttcactaccgccacggctcagaatgttgtcgaggaagctctgcccggtttcacggttgaaaatgccctcttcctcaaagcggctgaaagcatctgccgccagtacgtcagcccacaggtagctgtagtaacctgcggcataaccaccggcgaaaatatggctgaaagcgtgcgggaaacggccccaggacggagatggcaccacggcaaccagtttcttgatttctgccagagtttcgaggatttttgccccctgatccgggcggaactcggcatgaaggcggaaatcaaacaggccgaactccagctgacgcagaataaacagcgccgcctggtagttcttcgccgccagcattttatccagcaactctttcggcagcggttcgccggtttcatagtgaccagagataaacgccagcgcctccggctcccagcaccagttttccataaactgactcggcagttcgaccgcatcccacggcacaccgctgataccggaaacaccagcggtttcgatgcgggtcagcatatggtgcaggccgtgaccgaactcgtggaagagggtgatcacttcgtcgtgagtgaacagcgccggtttaccatttaccgggcggttgaagttacaagtcaaatacgcgaccggtttttgcaaagaaccatcagctttacgcatctggcctacgcagtcatccatccacgccccgccgcgcttgttttcacgggcatacagatcgaggtagaagctaccgcgcagttcgttattttcgtcatacagttcgaagaaacgtacatccggatgccagacatcaacatctttacgctctttagcggtgatgccgtaaatacgcttaaccacttcaaacaggccgttaaccgctttgttttccgggaagtacggacgcagctgttcgtcactgatgctgtagaggtgctgtttttgtttttcgctgtagtaagcgatatcccacggctgcaactcatcgacgccaaattcggctttggcaaaggcacgcaattgcgccagctctttttcgccttgtggacgcgcgcgttttgccagatcggttaagaaatccagcacctgctgcgggttttctgccattttagtggcaagggatttaaaggcgtagttttcaaagcccagcagttgcgccagttcgtgacgcagcgcgaggatctcttccatcaccttgctgttatcccatttaccggcgtttgggccttgatcggaggcgcgggtgctgtaagcgcgatacatctcttcacgcagagcctggttgtcgcagtaggtcattaccggcaagtagcttgggatatccagcgtcagcaaataaccttccagctctttcgcttcggcctgggcttttgccgcagccagcgcgctttctggcatccccgccagctccgcttcgtcggtaacgagtttggtccagcccattgtcgcatcgaggacgttgttgctgtactggttgcccagttcagaaagacgggtcgcaatttcgccgtaacgctgctgtttctctttcggcagacctatgccagagagttcaaagtcgcgcagtgcgttatcaaccgctttcttctgcgccgtgttcagcgtggcgtaatgatcgccatcgcgcaggtcgcgatacgctttatacagcccttcatgttgccctacccaggtgctgtattcgctcagcagcggcagggtttgttcgtaggcttcacgcagttccgggctatttttcacgctgttcaggtggctgaccggggagaagatacgccccaacacatcgtccacttccgccagcggctggcagagattttcccaggtgtacggtgccccttgcgctactacgcgctccacgttttcgcggcagtcgttcaatgccttagtcacggctggaacgacatgttccgggagaattttagaaaacggaggcaattcaaagggagtcagtaacggattcgtcattcgcgcagtcctggttaaagaggttaaggaagcgctcaacaggcgctttacataatgtgtgtagcatggggttaagtgtagtgaatttcaatgagaaacgttacgctttcgcggcggcggcctcttttcggtatactgtcctgatacgcttttgtgcgccccgaatacgggccgatttttacttaccggaacacctttacccatgctcagttatcgccacagctttcacgctggcaaccacgccgacgtccttaaacataccgttcagagcctgatcatcgagagcctgaaagagaaagataaaccgtttctctatctcgacacccacgcaggggccgggcgttatcagttaggcagcgaacatgccgagcgtaccggcgaatatctcgaaggcatcgcccgtatctggcagcaggacgatttgcccgcagaactggaggcgtacatcaatgtggtaaaacacttcaaccgtagcggtcagttgcgttactaccccggtagcccgttgattgctcgcctgctactgcgtgaacaggacagcctgcaactgaccgaactgcacccgagcgattacccgttgttgcgttctgaatttcagaaagatagccgtgcgcgtgtcgaaaaagccgacggtttccagcagcttaaggccaaactgccgccggtttcccgccgtggtttaatccttatcgacccgccgtatgaaatgaaaactgactatcaagcggtggtcagcgggatagcagaaggttacaaacgtttcgccactggtatttacgcactgtggtatccggtggtgctgcgtcagcaaattaagcgcatgatccacgatctggaagcgaccggtattcgcaaaattctgcaaattgaactggcggtactgccagacagcgatcgccgtggcatgaccgcttccggcatgattgtgattaacccgccgtggaaactggaacaacagatgaataacgtgctgccgtggctgcacagcaaactggttccggcaggcaccgggcacgccaccgtaagctggatcgtgccggagtaattgcagccattgctggcacctattacgtctcgcgctacaatcgcggtaatcaacgataaggacactttgtcatgactaaacactatgattacatcgccatcggcggcggcagcggcggtatcgcctccatcaaccgcgcggctatgtacggccagaaatgtgcgctgattgaagccaaagagctgggcggcacctgcgtaaatgttggctgtgtgccgaaaaaagtgatgtggcacgcggcgcaaatccgtgaagcgatccatatgtacggcccggattatggttttgataccactatcaataaattcaactgggaaacgttgatcgccagccgtaccgcctatatcgaccgtattcatacttcctatgaaaacgtgctcggtaaaaataacgttgatgtaatcaaaggctttgcccgcttcgttgatgccaaaacgctggaggtaaacggcgaaaccatcacggccgatcatattctgatcgccacaggcggtcgtccgagccacccggatattccgggcgtggaatacggtattgattctgatggcttcttcgcccttcctgctttgccagagcgcgtggcggttgttggcgcgggttacatcgccgttgagctggcgggcgtgattaacggcctcggcgcgaaaacgcatctgtttgtgcgtaaacatgcgccgctgcgcagcttcgacccgatgatttccgaaacgctggtcgaagtgatgaacgccgaaggcccgcagctgcacaccaacgccatcccgaaagcggtagtgaaaaataccgatggtagcctgacgctggagctggaagatggtcgcagtgaaacggtggattgcctgatttgggcgattggtcgcgagcctgccaatgacaacatcaacctggaagccgctggcgttaaaactaacgaaaaaggctatatcgtcgtcgataaatatcaaaacaccaatattgaaggtatttacgcggtgggcgataacacgggtgcagtggagctgacaccggtggcagttgcagcgggtcgccgtctctctgaacgcctgtttaataacaagccggatgagcatctggattacagcaacattccgaccgtggtcttcagccatccgccgattggtactgttggtttaacggaaccgcaggcgcgcgagcagtatggcgacgatcaggtgaaagtgtataaatcctctttcaccgcgatgtataccgccgtcaccactcaccgccagccgtgccgcatgaagctggtgtgcgttggaagcgaagagaagattgtcggtattcacggcattggctttggtatggacgaaatgttgcagggcttcgcggtggcgctgaagatgggggcaaccaaaaaagacttcgacaataccgtcgccattcacccaacggcggcagaagagttcgtgacaatgcgttaaatgttaaagggctaagagtagtgtgctcttagcccttaattacgtttccgctatcagttcagaagctgaagcagaaagcggatcagttccagcagcgcaattaacgcccctagaacgatgattgctttatcaatcacccgttttctccatgcgatggagtgagaatgcatccgcttactcatccactgcctgtcacggcgcatgtctcattgttagataagaactctctcactccggccagagcatcagttaacggcaccacccgtacttctgaccaggactttgaaagcgtttatgcgcattgccagagtgaaaatgcctcagagctaactggataatcatacagtacatgcaggttataaaaccagcacgtccttgcaatagtttcagtatggtattagcattgatgcgttagatgatggctatctcactccagtcagagccaccaactcagggctggaaagtaaaaaaccgacgcaaagtcggtttttttacatccggattcggacaaggcttaatatgacgatgacccagtgaaagtatataaatcgtcactgcgatatataccgaagtgctccctccgccagctgaagaaatcgctaattcttgcaatgttagccactggctaatagtattgagctgttagataagaactctctcactccagccagagccaccaactcagggctggaaagtaaaaaaccgacgcaaagtcggtttttttacgtcctgattcagacctcctttcaaatgaatagccaactcaaaattcacacctattaccttcctctgcacttacacattcgttaagtcatatatgtttttgacttatccgcttcgaagagagacactacctgcaacaatcaggagcgcaatatgagttttctgttacccatccaattgttcaaaattcttgctgatgaaacccgtctgggcatcgttttactgctcagcgaactgggagagttatgcgtctgcgatctctgcactgctctcgaccagagccagcccaagatctcccgccacctggcattgctgcgtgaaagcgggctattgctggaccgcaagcaaggtaagtgggttcattaccgcttaagtccgcatattccagcatgggcggcgaaaattattgatgaggcctggcgatgtgaacaggaaaaggttcaggcgattgtccgcaacctggctcgacaaaactgttccggggacagtaagaacatttgcagttaaaaatttagctaaacacatatgaattttcagatgtgttttatccgggaggcattatgttactggcaggcgctatctttgtcctgaccatcgtattggttatctggcagccgaaaggtttaggcatcggctggagtgcaacgctcggcgcagtactggcgttagttacgggcgtggtccatccgggtgatattccggtggtgtggaatatcgtctggaacgcgacggctgcgtttatcgccgtcattatcatcagcctgctgctggatgagtccggcttttttgaatgggcggcgctgcacgtcagtcgctggggtaatggtcgtggtcgcttgctgtttacctggattgtcctgctcggtgctgccgttgccgccctgtttgccaatgatggcgcggcgcttattttgacaccgattgtcatcgccatgctgctggctttagggttcagtaaaggcactacgctggcgttcgtgatggcggccggattcattgccgataccgccagcctgccgcttattgtctccaacctggtgaatatcgtttccgctgatttctttggcctcggctttcgcgaatacgccagcgtgatggtgccggtggatatcgccgcgattgttgccacgctggtgatgttacatctctattttcgcaaagatattccgcagaactacgatatggcgctgctgaaatctcccgcagaagcgatcaaagatcctgctacgttcaaaactggctgggttgttttactgcttctgctggtgggatttttcgtcctggaaccgctcggcattccggtgagcgccattgcagctgtgggcgcgctgatattatttgtcgtcgctaaacgcggtcatgcgattaatacgggtaaagtcctgcgcggtgccccctggcagattgtcatcttcagcctcggcatgtatctggtggtttatggcctgcgcaatgccggattaacggaatatctttctggcgtactcaacgtgctggcggataacggcctgtgggccgcgacgctcggcaccggattcctcaccgccttcctctcttctattatgaacaatatgccgacggtactggttggcgcgttgtccattgatggcagcacggcatctggcgttatcaaagaagcgatggtttatgccaatgtgattggctgcgatttgggaccgaaaattaccccaattggtagcctggctacgctactctggctgcacgtacttagccagaagaatatgactatcagctggggatattacttccgtacagggattatcatgaccctgcctgtgctgtttgtgacgctggctgcgctggcgctacgtctctctttcactttgtaatgagatactgatatgagcaacattaccatttatcacaacccggcctgcggcacgagccgtaatacgctggagatgatccgcaacagcggcacagaaccgactattatccattatctggaaactccgccaacgcgcgatgaactggtcaaactcattgccgatatggggatttccgtacgcgcgctgctgcgtaaaaacgtcgaaccgtatgaggagctgggccttgcggaagataaatttactgacgatcggttaatcgactttatgcttcagcacccgattctgattaatcgcccgattgtggtgacgccgctgggaactcgcctgtgccgccctagtgaagtggtgctggaaattctgccagatgcgcaaaaaggcgcattctccaaggaagatggcgagaaagtggttgatgaagcgggtaagcgcctgaaataaagcggcgatatcccccccacaggttgttagaaaagtgcgctttatttatgtcggatgcgacgctggcgcgtcttatccgacctacaaagttatgaaaattcgatgaatagtatgttatttgtaggcctgacaggcgtagcgcatcaggcgattttgctatttacacagtactccctgcgtgagattccaattatcgcgtccagcatggtgtatcagtgagctgcttagttatcagcgatacagcgcagtagtttaaagacgtactggattatgatttatcagtggtttacacaacaaattattaaataattataagataccttaacccattttattattacacatctaaaacatcacaaaaaaaatcacttcacacactatcagagaacataataactttttaaaatgagcgcattttgatagttgttaacgatttcctttacgatactatcactaccctttttttacacacaaatattaccgggtggagataaaagggaaatcaaaggtaattatatcaggaagatataacgcattacatttattgtgtgtagaagaaaatccattcctgttctaattatccaatttaaacatcttagcataaaacaaatgatgaataaggaattttatattgattattagcactttataatcattgaataaaaatagattttatgtacttttaaaacaatgcactatattatggggtgatggatattcatgtcacgccccaaaattaactgagttcacctaaacagaaaggatataaacatcagacaggtttacgttactatcaggcatatcacctcagaatcagatgaaaactataaagaaatatctattatggttttaatatttgttgataaggatagtaacatgaacatgacaaaaggtgcactcatcctcagccttagttttttgcttgccgcatgtagtagtattccgcaaaatatcaaaggcaataaccaacctgatattcaaaaaagttttgttgctgttcataaccagccggggttatatgttggtcaacaagcgcgctttggtgggaaggttatcaacgttatcaatggcaaaacggatacgttgttagaaatctctgtattaccgttggatagctatgcgaagcctgatattgaagccaactatcagggccgactgctcgccagacaaagcggcttccttgatccagtgaactatcgtaatcactttgttaccatcctcggcaccattcagggtgaacaacctggctttatcaataaagtcccgtataacttcctggaagtgaatatgcagggcatccaggtgtggcatttgagagaagtggttaataccacctataacctgtgggattacggctatggtgcattctggccggaaccgggctggggtgcgccttactacaccaatgcggtgagtcaggtaacacctgagctggtcaaataacaccaccgaaagatgcagatgctttctcagcatctgcatcatgcattacatcaaattaatacacagtaagctaactattattattataagccctgtcctgttaattacctttggcaaactgattataaagttaatgtccgcaccaggagtcggttatgtttcttataattaccagggatacgatgttcttcaccgcgatgaaaaacattctgagtaaaggtaatgtcgttcatatacagaacgaagaagagatcgacgtaatgttgcatcagaatgccttcgtcattattgatacattaatgaataatgtatttcattctaattttctcactcaaattgaacgattaaaacctgtccatgtcattattttctccccctttaatattaaacgctgcctggggaaagtgccggtgacctttgttccgcggactatcactatcattgattttgtcgcactcatcaatggcagttactgctctgtgcctgaagcggctgtgagtcttagccgcaagcaacatcaggttctgagctgcattgcgaatcaaatgacaacggaagatattctggagaaactgaaaataagcctaaaaacgttctactgccataaacacaatatcatgatgatcctcaatcttaagcggatcaatgagctggtacgccatcagcatattgattatctggtgtgaatttcaggcttacggtgagtctggctacgctgccacacagattagctaatactaacgcctttcacccctgccataccttttaataatcgcaacaggtcttctatgctcgttgtggcatgaagctggatatcaatggcgaccacttcatgatcttcattttcctgcaagctaactaaatcagtttttattttttgctgcttaaaccagtcgagcatacttaccgtattaccgttcactaatgtcagctgtaaatggtaatttttgttcatcaggcggaaggttaattgatggaagacttccagcaccaacaaggtcatcacactaccataaatacccagttcgtacataccgctgccaataaccatacctatggcggcggtcacccagatatccgctgccgtcgtcagacctacaatattttggttacgaacgagaatgttacctgcaccgataaacccgacgcccgtcaccacctgagcagcaatacggctggggtcgagtccgacgtgatctaaagacagcacgtcagcaaaaccatatttgctaacaatcataaacagggcgcttcccatgccaattaatacatgtgtgcgtaaccctgctcctttgccgcgcatttgcctttccatgccaatagcgccacaggcaattgccgcgagtataagacgtataataaattctgctgtcatataaaaatgcaaaaaggagcagcaagatggctcaacttgctactcctttttacttgcacctcattaattcggcaagtcattagatgcttgatttttgaaggtatacaaatttttctgcgggtttttcttacagtattcgatcactttaggaatttgagtgagatcggtttcatttaaagtaacggtatcgccacctttatatactgtttcttcatgcagcatccaccatgcaaccggggtcattgcttttggattcagatcaataaattcctggcaggtcatatctttagcggattcattggctgccaacgcagattgtgcgttcaccagactcaaagccgctacagcgcccataaaaataaacgctttacggagagaactaatattcattttgtaacccattcaatatagagattatatatgaacaggaggaatagctgcttttaaagaagatattccggcctgttcaatatgcaaggaagtacgatgtaacgcattcccggaattacatatctttcttaattttgtcccattcgcctttaactttatctttaaagttggcttgtttatcctgagtacaagcctgaacgatagctggggttacggttgcaataccctgaacatctaaaaccgcatcttctggtttatctttgttgttcagcgcttcagcaaaaccaactgcagttggctggaaggattcgtccacagccaggaaatcttcacaggtccaggagttgaccggttttttgttatcagctgctttttgcgcatccgctgcattgctcacaactggcagaagaagcagaccaccaagaataacgcctaatacttttttcatcgtaatatcctcaactataaagtgaaagagccgtcacgaatcaatttcgacactgaggttataacctggttttctgtatatgtcatgttgatggaaaatatcaaaatcagatatttttatttcaatacaatgagttacagatgcatcagatactgcaattaggaaatttttattaaatcgactgcattcttagacgcgtttttggcatagattgatagcaggggattttcttcttaattttatagggtggttctatgttatatatagataaggcaacaattttgaagtttgatctggagatgcttaaaaaacatcgcagagcaatccagtttattgccgtgctgctgtttatcgtcgggttgctgtgtatcagtttcccgttcgtctctggcgatattttaagcacagtagtgggtgcattattaatctgcagcggtattgcgcttattgtcgggttattcagcaaccgcagtcataatttctggccggtattatccggtttcctcgtcgcagtcgcctatttattgatcggctatttcttcatccgcgcaccggagctgggcatttttgccattgcggcatttattgccggtttgttctgtgttgcaggggttattcgcctgatgagttggtatcgtcagcgtagtatgaaaggcagctggctacagctcgttattggtgtgctggatatcgtcattgcctggatattccttggtgcaacgccgatggtgtctgtaacgctggtttccacactggtgggaattgaactgatatttagcgccgccagcctgttcagcttcgccagtttgttcgttaagcagcaataattaccccggttgtcacccggatcatagtcacttgatgtgactatgatccgattaatactctctccgctacgcagtgttgtagatcaattgcgcactatcattgaaataattacctgctagtgattatttcaacctactgaatttcatctaatttttttcactctatggcaaattagccatttcaaacattatcatggctgatattttccgtagtcaggtttaatgttttaaaagtgctgtgggaaagtgaacaaagagttccgtaagcgttgatgctatgggcggttaaataagtaatccgggttcatttttttgcaactggcgttgattacattgcataaatatccgtgtctccagacgctatataaaaacctgaagacatgaatgcgttatttactcaggtaatttcaatgcgttaaaagaaagctggcaatccaattgccagcttaagtcgaaacaaggagactcgatatttaaatcggattacattttaactttagtaatattcttcagagatcacaaactggttattgataacttattcttgggcagtaatccgcaaacgttaactttttgtttgctatttacaagctgataacaaccaggaatcttacttaggatcaatatatggagtgcgtgatggataaatctgaagtattgattagtgttaatagacgtattagttcacgaagggtaaagttcttataggcgtttactatattgaacaacgattcggacaaggatgtaaataatgaaaaggatgacatattcgaaacgataacggctaaggagcaagttatgatttttctcatgacgaaagattcttttcttttacagggcttttggcagttgaaagataatcacgaaatgataaaaatcaattccctgagtgagatcaaaaaagtaggcaataaacccttcaaggttatcattgatacctatcacaatcatatccttgatgaagaagcgattaaatttctggagaaattagatgccgagagaattattgttttggcaccttatcacatcagtaaactaaaagctaaagcgcctatttattttgttagccgcaaagaaagtatcaaaaatcttcttgagattacttatggtaaacacttgccccataagaatagtcaattatgttttagtcataatcagttcaaaattatgcaactgattctgaaaaataaaaatgaaagcaatatcacgagcacgctcaatattagccaacaaacattaaagattcagaaattcaacattatgtacaagctgaaactaagacgtatgagcgacatcgtcaccctgggtatcacatcttatttttaatcaggacataagcaactgaaattgatggctggcatgacgagggatgcagatgctgatttcattacccccggtgattactaaaggagaggctaaaacgactttattcccctggtatgtgtatccaccagtagaacccttcgttgcccgaatgctggcaggaactgttggcagaacggcaacattttttttgtcgttgacctcaccatgtcgatcactgtgcctgtatcccaccttactggctgacaaccccactatgccgctggtctgtaaatccctcatatctctcctcgcgcgcaatttaaagaaccgttatttctcaagaattttcagggactaaaatgaacagaagaagaaagctgttaataccgttgttattctgcggcgcgatgctcaccgcctgcgatgacaaaagcgcggaaaacgccgccgccatgacgcctgaggtcggtgtcgtcacactctcccccggtagcgtcaatgtgttgagcgaattgcccggtagaaccgttccttatgaagttgccgagatacgtccccaggtgggcggtattatcattaaacgcaactttatcgaaggcgataaagtgaaccagggcgatagcctgtatcagattgatcctgcacctttacaggccgagctaaactccgccaaaggcagcctggcgaaagcgctctctaccgccagcaatgcccgcatcacctttaaccgccaggcaagcttgctgaagaccaactacgttagccgtcaggattacgacaccgcgcgcacccagttgaatgaagcagaagccaatgtcaccgtcgccaaagcggctgttgaacaggcgacgatcaatctgcaatacgcgaatgtcaccagcccgattacgggcgtcagcgggaaaagcagcgtgaccgtcggcgcactcgttaccgctaatcaggcagatagcctggttaccgtacaacgtctggacccgatttatgtcgatctcacgcagagcgtgcaagatttcttacgcatgaaagaagaggtcgccagtgggcaaatcaaacaggttcagggcagtacgccagtacagctcaatctggaaaatggtaaacgctacagccagaccggcacgctgaaattctccgacccgacagtggatgaaaccacgggctccgtgacgttacgggcgattttccccaacccaaatggtgacttgctgcctggcatgtacgtcacggcattagtggatgaaggtagccgccagaatgtattactggtgccgcaggaaggcgtcacccacaacgcccagggtaaagcaacggcgctcattctggataaagacgatgtcgtgcagctacgcgaaattgaagccagcaaagccatcggcgaccagtgggtcgtcacctctggcttgcaggctggcgatcgggtgatcgtttccggtttgcaacgcattcgtccgggtatcaaagcacgagcaatttcctccagccaggaaaacgccagcaccgaaagcaaacaataacgttgcaggcttaaggggactttcatggctaactattttattgatcgcccggtttttgcctgggtacttgccattattatgatgcttgcaggtggtctggcgatcatgaacttaccggttgcgcagtatccgcagattgcgccaccgaccattaccgtcagcgctacctatccaggtgccgatgcgcaaacggtagaagacagcgtcactcaggtgattgagcaaaatatgaatgggcttgatggcctgatgtacatgtctagtaccagtgatgcggcgggcaatgcctctatcactctgaccttcgagactgggacatctcctgatatcgcacaggttcaagtgcaaaataaactgcaactcgctatgcctagtttacctgaagcagtgcagcagcaggggattagcgtcgataagagcagcagtaatatcctgatggtagcggcgtttatttctgataacggcagcctcaaccagtacgatatcgcggactatgtagcgtctaatatcaaagacccgctaagccgtaccgcgggcgttggtagcgtacaactctttggttccgagtatgccatgcgtatctggctggacccgcaaaaactcaataaatataacctggtaccttccgatgttatttcccagattaaggtgcaaaacaaccagatttccggtggtcaactgggtggcatgccacaggcggcagaccagcagctaaacgccagcatcattgtgcagacgcgtctgcaaacgccggaagaatttggcaaaatcctgttgaaagttcagcaagatggtagccaagtgctgctgcgtgatgtcgctcgcgtcgaacttggggcggaagattattccaccgtggcacgctataacggcaaacctgctgccgggatcgccatcaaactggctgccggagcaaacgccctggataccagccgggcagtcaaagaggaactgaaccgcttaagtgcctatttcccggcaagtctgaagacggtttatccttacgacaccacgccgtttatcgaaatttctattcaggaagttttcaaaacactggttgaggctatcatcctagtcttcctggtcatgtatctgtttttgcagaatttccgtgccacaatcatcccgacgattgccgtaccggtggttattctcgggacgtttgcgatcttgagcgcggtcggtttcaccatcaacacgttgactatgttcgggatggtgctggcgatagggttactggtggatgacgccatcgtggtggtggagaacgtcgagcgtgtcattgcggaagataagctaccgccgaaggaagcgacgcataaaagcatggggcagatccaacgtgcgctggtcggtattgccgttgttctttccgcagtgtttatgccgatggcctttatgagcggtgcaaccggggagatctaccgccagttctccatcacgctgatctcctccatgctgcttagtgtatttgtggcaatgagcctgacccctgccctgtgcgccaccattctgaaagccgcgccggaaggcggtcacaaacctaacgccctgttcgcacgcttcaacacgctgtttgaaaaaagtactcaacactataccgatagcacccgcagcctgttgcgttgtaccggtcgctacatggtggtctacctgctgatttgcgccgggatggcggtgctgttcctgcgcacgccgacctctttcttaccagaagaggatcagggggtatttatgaccaccgcgcagttaccttccggtgccaccatggttaacaccacgaaagtgctgcaacaggtgacggattattatctgactaaagagaaagataatgtccagagcgtgtttaccgttggcggctttggcttcagcggtcaggggcaaaacaacggcctggcgtttatcagtctcaagccgtggtctgaacgtgtcggtgaggaaaacagcgttaccgcgatcattcagcgggcaatgattgcgttaagcagtatcaataaagccgtcgtcttcccgttcaacttacccgcggtggctgaactgggtaccgcgagtggttttgatatggaactgctggacaacggtaacctggggcacgaaaaactaacccaggcgcgaaacgagctgttaagtctggcagcgcaaagtccgaatcaggtcaccggggtacgcccgaacggcctggaagatacgccgatgttcaaagtgaacgtcaacgctgcgaaagctgaagcgatgggcgtggcgctgtctgatatcaaccagacaatttccaccgccttcggcagcagctacgtgaacgacttcctcaaccaggggcgggtgaaaaaagtgtatgtccaggcaggcacgccgttccgtatgttgccggataacatcaaccaatggtatgtacgcaacgcctctggcacgatggcaccgctttctgcctacagctctaccgaatggacctatggtagtccgcgactggaacgctacaacggcatcccgagtatggagattttaggtgaagcggcggccgggaaaagtaccggtgacgccatgaaatttatggcagacctggtcgctaaacttccggcaggcgtcggctacagttggaccggactaagctatcaggaagcgttatccagtaatcaggctcctgcgctgtatgcgattagtctggtcgtggtgttcctcgccctcgccgcactctatgagagctggagtattccgttcagcgtgatgttggttgttccgttaggcgtcgttggcgcattactggccaccgatctgcgcggcttaagtaatgacgtctacttccaggttggtttgctgaccaccatcgggctttccgccaaaaacgccatcctgattgtcgaatttgccgttgagatgatgcagaaagaagggaaaacgccgatagaggcaatcatcgaagcggcgcggatgcgtttacgcccaatcctgatgacctctctggcctttattctcggcgtgctgccgctggttatcagtcatggtgccggttctggcgcgcaaaacgcggtaggtaccggcgtgatgggcgggatgtttgccgcaacagtgctggcaatttacttcgttccggtctttttcgttgtagtggaacatctctttgcccgctttaaaaaagcgtaacgtgtaaatgagagtaaggttgaacatgaaggttcagccttactctttcctgctaaccattcaccactcaacaaccagctaaccgtcaggaataccaggcttagtacacagcactgaaagtagaaaccactccagccattcgtcatcaatttgaacaacacaatactgacccacattcccgtaatcgtatgaattgtcagcttaataatcccaaacatgccgagtcttttcctcctgaaaataccgataccgcctggcaaactgcgaaagagaactagccggtagcccggcagaaatcatcagggaagagtttcacatgaagcaggtgtgagatcctgaccaatattcaaatgcgaaatatgtcaggaaaaggtacctgggctatgttgcgcaaactgatgtggcgttacaccataatattgtcgaaatgtgtttataaagtagcttgtactgctatagccacatttttccgcaatagtatgcagaggaatttgacgtaactcgagtaatcgtctggccatgctcatcctggaggcgagtaatattttactgaaacaggtattttcatcctgcaacttttttttgattagactctcgctggtatacattctttccgcgatatcgcgcagataccaacgtttggcgatatcaaagctaataaggcgttcaacttttccactaacagtgctgatgctattgaaaagtaaggggatcagttctttcttatgagaaaacatgcttaaacaggaaaggtagagcatattgctcagtatcggactatttaccccggattcattgaagctatcaaaaatcgccgtcaccagcggcatggggggactctggttaattaacaaacggtctttgctgtgtaaccctaaattgcgtggtagctgacgaatattttgtaagtaatggcaaactgtcagctcatcgatatccagtcgtcgcgtatccggactacaaaacgcaaaatcgtctgccaaatttttctccagcagcagaatactctcgttatgcaggcttattttttgctgttcatgataaatatcgaaactacgacgaatgaggatcacgctgcagacatgagtcatgattatcccttatatttcatactgcgattatttcaatttcagtatactaatgaaatgatgccagactgtttcttagcgcaaaaactgccagatttggtaggaccaaaatttatccacaaagtagttttgcataacagttaattgataataagtaaatgcagcacgaatatattttcgcacagcgtatagcttatgtttataaaaaaatggctgatcttatttccagtaaaagttatatttaacttactgagagcacaaagtttcccgtgccaacagggagtgttataacggtttattagtctggagacggcagactatcctcttcccggtcccctatgccgggttttttttatgtctgagtaaaactttataatcttattccttccgcagaacggtcagtgccgtaaaaattcccttgcgcaacaatacttgccgcgctgtcacggttgctcaatctctgcgcgcttcgctcctgatactctgtgggcgtcatcccataataatttcgaaagacgtaaatgaaatagctcacgctgtgatatccacaggatactgcaactcgcttaatactaaaaccatgtataacaataagttgcaaagcacgttgcattctacactcagtaagcaactgactataacttgtctcttcttcgcgcaattttttctttaacagacttggactcatcaacagctcgctggcgattcgggctagtgtccactcatgggcgatattattattgataaccgtacaaactcgtgttcgcatgttcggttgtaaaacgttcagaagcagcggtataaagtgctcatcctcaagaaaaacagataacaacgcaaagattaatgctcttttacgtagcatttctgcatagcgaagattcttattctggcttagttgcgcaacttcctgaaaaacaggaatatctctactacagtgatgaacgagtaaactagaaacttttttatgtgcatgaagatttaatgcctcctccttgagcatcgggagaaataaactaagcgtgtccctactcacgaatacaaaattttcaacacacttatctactcgaatttggcttgcatccgcaaaaaccaggtcaccgccattaaaatagcgatattcaccattaaccatggtgagaatatatttatgtcttgcatacgcaattagacaattcccatgtagactttgcatagttgacttaatattacataaacatattactgtttattaatgtagcacgccgccctcttaagtcaaattgattgataaataaatttaaacgaagcgggagaacaggatgataatgtgtgatgttctacgggcaggatgactggatttataatacaaaaacgtgtttaagaacacagggaaattaatagtaagcaaataatcccttttcgtgacattaaaggtaatcgctacatttaataaacattcatataacatatatcttatcaacacgatgaatagacagccaatatattattgcgattaataagcaaccgaatgcccagctgtttttttaaaggctgggcattcggtttttacaacgttatgttatcaggtgtgtttaaagctgttctgctgggcaataccctgcagtttcgggtgatcgctgagatatttcagggaggctttgtagtcttccagcaacagttcagcaaagtccatttcgaagccgcgacgacacataatgcgcatcaccacgatgtcggtggcttcaccgccgagagtgaaggccggaacctgccagccgcgcagacgcagacgttcagagaggtcgtacagggtgtatcccggatcttcaccatctttcagtttgaagcaaaccgccgggatgccttcgtccgggcgacccgtacagatgaactcatacggccccagtttggcgatttcatccgccagataagcggcaacctggtaagaggcgttctgtactttggtatagccttcacgaccgaggcgcaggaattcatagtactgtgcaattacctgacccgccgggcgggagaagttgatggcaaaagtaccaatttgaccacccaggtagtcaacgttgaacaccagttcctgcggcagcgcttcttcgtcacgccagataacccagccgcagcccagcggagccagaccgaatttatggccactagcactgatgcttttcacacgcggcaggcggaagtcccagacgatatccggggcgacgaacggtgccaggaagccaccgctggcagcgtcgatgtgcatgtcgatgtcgataccggtgtcggcctggaatttatccagcgcatcgtgcagcggttgtgggaactcatagttaccggtgtaggtcacgccgaaagtcggcaccacgccgatggtgttttcgtcacaggcttcaatcatgcgtttcgggtccataaacaactgaccggggcgcatagggatctcacgcagctccacatcccagtagcgggcgaatttatgccagcagatttgtaccggaccgcacaccaggtttggtttatccgttggtttgcctgcagcttccatacgcttgcgccaacgccatttcatcgccatcccgccgagcatacaggcctcggaagaaccaatggtgttggtgccaacggcctgaccatttttcggcgcaggcgcatgccacagatcggcaaccatatttacgcaacgcaggtcgatggctgcggattgcggatattcttctttgtcgatccagtttttattgatgctcaaatccatcaatttatggacgttttcgtcgtcccaggtctggcagaaagtggccaggttctgacgagcgttgccatcaagatataattcatcattgataatctgaaatgcgacatcatcgcgcatttcgtgcagcggaaatcgtttactctccgcgatagtagaaatggcctttgcgccaaaacgactatcgagtagttcactgcggaaatccgttaacagcttctggtccatttcgaactccttaaatttatttgaaggcaataaaaaagtaggatttatccgcaatggaagcaaggcattacaggcttaatttaaataacaaaatcctaagcagaaaaacgactttttataatataaacatttaacatgataatattaaaaacagactttattatcgtaataaaaatcgcccaaacattgctgttcgggcgatcaaattaattattgtttatcctgcatatacggcgtgtacaccccgttcagactgtgcaggaaagctacgatatcatccacatcctcctgcggcagctctttgcctacctgatagcgcagcatcagtttcaccgccccgtccagcgtcggcacgtcaccgcgatggaagtacggtgccgttaaagcaacgttacgtaaaccgggtactttctgacgcaatttatcacgctcttctttagtcacattcatacgaccaatatccgccgccgtaatttccccaaagttaaagtcttttttcagccccaacggttcaaaggaacgtccgccgagaataataccaccatgacaagttgcacatttattatctttaaataattgatagccttttttctgttgcgccgtcagcgcattttcatctccgcgcaaccatttatcaaatggggaatccggcgtaattaatgttttctcaaattcagcaatggcatcagtaatattttcgccactgaaaccttgcggatagacttcgaggaactgcgttttaagctgcggatctttttccagcttagcaataatttcgtcccaggatttgctcgccatttcaatcgggttcaacggcggtccaccagcctgatcctgcaatgttgccgcacgaccatcccagaactgctcaacgttaaatacactgttaaataccgtcggcgcgttaatcggcccaactgcgccaccaacaccaatgcttgtttttctgccatcgacgccccccgcattcaacgcatggcaatgagcgcaactaatggtgctatcagcgcttaaacggggatcgtgatacagcgcaaaacccaacgccactttttgcgcatcggtaggcagtttttgcgggatgggctgcaccggttcattgcgatgttccggagcagtatcattgctggcgtaatattccgcgcgctgttttgcaatccaggccagtatttccgcccgctcttcatcactcaccttacccgcccagtgtagcgcggtataacgcgttggtggcatagtttcatactgcatcacccattcaatcttattcaaatcgctttggctaacgggtttatcagccagcagtgccgcacgcacggcctcaaggttaaaagatttatatccaagcttaatgtcgtaatccatcaactgtttcgcgccaggaatataataataggcgggtaattctgcgctaggcgtgtggcaatagtcgcatcctttttcgcggagaaagcctaaaaccttattattttcactgacagcagatgcctgaacatcggcctgtttactgcgtttattatcgtggtaccacacataaccagataaccctaaatagcaaatcgcgacgccagccaggccgatcgcggtaatacgactgaccattttcattattcttccctcacggtggtgagttattgtgacccagaaaattttccagaatgctgcaaacgtctctgcgagacaaagccatcataaaaaacagggagatacgctttttgataggaatcaatcaattacatgaatataaactatcaataagatagcctgtgcctattacccagatcaggaatggcatatcatgattgcggcgagagcaggattgaatgttctgaaaatgaaaaacaacaccaaatcggtatttttataaattccattgatattagtgcgttatattttttgacaggttaataaacgtgatccaccgcacgctttgtcgcccaccaggcggagcgaatgactacccttaaagaaaagccgataattagcgacgaatttcggaggttggatccttatgctcaatcagaaaattcaaaaccctaatccagacgaactgatgatcgaagtcgatctctgctatgagctggacccgtatgaattaaaactggatgagatgatcgaggcagaaccggaacccgagatgattgaagggctgcctgcctctgatgcgctgacgcctgccgatcgctatctcgaactgttcgagcatgttcagagcgcgaaaattttccccgacagtaaaacctttcccgactgcgcacctaaaatggacccgctggatatcttaatccgctaccgtaaagtgcgccgtcatcgtgattttgacttgcgcaagtttgttgaaaaccacttctggctgccggaggtctactccagcgagtatgtaagcgacccgcaaaattccctgaaagagcatatcgaccagctgtggccggtgctaacccgcgaaccacaggatcacattccgtggtcttctctgctggcgctgccgcagagttatattgtcccgggcggccgttttagcgaaacctactattgggattcctatttcaccatgctggggctggcggaaagtggtcgggaagatttgctgaaatgcatggccgataacttcgcctggatgatcgaaaactacggtcacatccccaacggcaaccgcacctattatttgagccgcagccaaccaccggtttttgcgctgatggtggagttgtttgaagaagatggtgtacgcggtgcgcgccgctatctcgaccaccttaaaatggaatatgccttctggatggacggtgcagaaagcttaatccctaatcaggcctatcgccatgttgtgcggatgccggacggaagcctgctcaaccgttactgggacgatcgcgacacgccgcgtgacgaatcctggcttgaggacgttgaaaccgcgaaacattctggtcgcccgcccaacgaggtgtaccgcgatttacgcgcgggggcggcctccggttgggattactcttcccgttggctgcgtgatactggtcgtctggcgagcattcgtaccacccagttcatccccatcgatctgaatgccttcctgtttaaactggagagcgccatcgccaacatcagcgcgctgaaaggcgagaaagagacagaagcactgttccgccagaaagccagtgcccgtcgcgatgcggtaaaccgttacctctgggatgatgaaaacggcatctaccgcgattacgactggcgacgcgaacaactggcgctgttttccgctgccgccattgtgccactctatgtcggtatggcgaaccatgaacaggccgatcgtctggcaaacgccgtgcgcagtcggttactgacacctggcgggattctggcaagcgagtacgaaaccggtgaacagtgggataaacccaacggctgggcaccgttacaatggatggcgattcagggatttaaaatgtacggcgatgaccttctgggtgatgaaatcgcgcgaagctggctgaagacggtgaatcagttctatctggaacagcacaaactgatcgaaaaataccatattgccgatggtgttccccgcgaaggcggcggtggcgagtatccgttgcaggatgggtttggctggactaacggtgtggtacgccgtttaattggtttgtacggcgaaccataatatttttacagccagccgctaacttcctgctggctgtaaaattatcctcttcaggaggagatatttaacatcattgccgcctgggtgcgatttttcacttccagacggcgatacagggattccagatgcgcttttaccgttccggtactgatattcagcgctctgccgatctccttattactttcgcccgccgctaacatggttaaaatctcccgctggcgggcgcttaagcttttgagatctttaatgtccttttccggcgtcgtccgccagtctccaggcagaaacatcatccccatcgccgcactatttaccgccaacgcaaatgtctcgacggtactatcacgaggcacaatggccagcacattaaaatggataacttcctgtaaccaccgtttattgcaatccgtcgccgtaattaacaccttaacctcaggaaattgcaccacggttttttgcagcaaccagtagcaaaactcaccatcctgatcgccatcgagcataactaaggcttcagggtaactttccagcttttgccataactcgtctgcctgactggccccctgaatactcactcctggaatacgctgctgtaaactgattttcattccatgaataaatatactctgcctgtcaaacatgactatttgcataactgaatctccacctgaatacgttaaaaagacttaagtagtggaagggtattacccgcgagaaaaaataagaattcgccatttggcggtggccattctacagagatgacgtgtagaaaatagttaccgatataaatagttacagctaaacgcctgaaattacatgtcgagggcactatttaaaacaattttgaggatttccttatattggtggttagtacgcatgcaattaaaaatgaaattccgcgaccacaagccaaaataacaaacggcaaggagacaaaaataagcacaaatagccaacacgtcctctgttcactttaaagggaatcgctgaaaaatacgctctgtttaaggggattcacctttctcagaaagctattccgcccttttcctgctgagaaatcgccacattcggcatgacaacattgtgaaacccggcattagatgttagaaaaaacaataaacaatgcgatatgcgcgttactgtttcgctgtgaacaacaaagcgtcaaagaaatggataaaattcacgcaatgcagttgttcatcaaagtcgcggagctggaaagtttttcccgcgcagcggatttctttgctttgccaaagggaagtgttagccgccagatacaggcactggaacatcaacttggcacccagcttctccagcgcaccacgcgacgggtcaaactcacgccagaaggcatgacctattatcaacgagcaaaagatgtgttgagtaatctcagcgaactggacggtctgtttcaacaggatgccaccagtatcagcggtaaattacgcatcgacatcccgccaggaatcgcgaaaagcctgttactgccgcgcctgagcgaatttctctatctgcatccgggaattgagctggaactgagtagccatgaccgtccggtagatattcttcatgatggttttgattgcgtgatacgcactggcgcgttaccggaagatggcgttatcgcccgtcccctcggcaaactgaccatggtcaactgtgccagtccgcactatctgacgcgctttggttatccgcaaagccccgatgatctgactagtcacgcaatagtgcgttatacaccgcacctgggtgtacatccgttaggttttgaggttgccagcgttaatggcgtccagtggtttaagtctggcggcatgttgacggtaaacagtagcgaaaactatctcaccgccggtcttgccggtctggggattattcagatcccgcgcattgccgtgcgcgaagccctgcgtgccgggcggcttattgaagtattacctggctaccgtgccgagccgctctcccttagcctggtttatccgcagcgtcgggagctttcccggcgtgtaaacctgtttatgcagtggctggctggcgtaatgaaagagtacctggactgaccgactatactttttaagaatgaccacgacagaaggacaaaagagcggatgacgcaggaaaacgagatcaaacgtcccatccaggatctggagcacgagccgattaagccgttggataatagcgagaaaggcagcaaagttagccaggcgctggaaaccgtcaccaccactgccgaaaaagtccaacgccaaccggttattgcgcacctgattcgcgcgacagaacgctttaacgatcggctgggtaaccagtttggtgcggctatcacctatttcagttttttgagcatgataccaattttgatggtgagctttgccgcagggggctttgtgctggcctcccatccgatgttgctacaggatatcttcgacaaaattctgcaaaacatcagcgatccgacgctagccgccacgttgaaaaacaccatcaacaccgccgttcagcagcgtacgactgtagggcttgtcggcctggcggtggcactttattccggcatcaactggatgggtaacctgcgtgaagcgattcgtgcccagagccgcgatgtctgggaacgcagcccgcaagatcaggagaagttctgggtaaaatatctgcgagattttattagcctgattggtttgttgattgcgctgattgtgacgcttagcatcaccagcgttgccggtagcgcgcagcaaatgattattagcgccctgcacctgaacagcattgagtggctgaaaccgacgtggcgattgattggcctggcgatttccatcttcgccaactatctgcttttcttctggatcttctggcggttgccgcgccaccgtccgcgcaaaaaagccctgattcgcggaacatttctggctgctattggttttgaagtgattaaaatcgtgatgacctacaccctgccaagcttgatgaaatccccctctggcgcagcatttggttccgtgctggggctgatggcatttttctacttcttcgcccgtttgacgctgttttgcgcggcgtggattgccaccgccgaatataaagacgacccgcgaatgccggggaaaacgcagccttaaaataggccggatgcggcgtaaacgccttatccggcatacgattttattcggcctggctccccgtaggccggataagatgcgccagcatcgcatccggctataatgcgcacataacctcttgaaactcgtccccagagcctcttcagccatctatttgggagcaaacaatttcattccaactcataaccccagcatataaatccagttggtaacttttatttaacctgaaaccagttttatccactatttataaaattatgtgaagcatttcatagaagaaaaatcactggcctaaacattatcccctttttgcctgatttttgaccatttccgcgatttgttacacattgaaatatcacttttgctgtgcgtaatatggctattcgttagccaaaaaataagaaaagattatgcaagcaacagccacaacactcgaccacgagcaagaatacacgccgatcaacagccgtaataaagtccttgtcgcctctctcattggcacagccattgagttcttcgacttttacatttacgccactgcggccgttattgtgtttccgcatatcttcttcccgcagggcgatcctacggcagcaacgctacagagcctcgccaccttcgccatcgccttcgtcgcgcgccccattggctctgccgtttttggtcattttggcgatcgcgttgggcgtaaagcgacgctggtcgccagcttgctaacgatggggattagcaccgtggtgattggtctgctgccgggctatgccacgattggtattttcgccccgctgctgctggcgctggctcgatttggtcagggtctgggcttaggcggtgaatggggcggcgcggcgctgctggcgactgaaaacgccccaccgcgcaaacgtgcactgtatggctcctttccgcagctgggcgcaccgattggcttcttctttgccaatggcactttcttgctgctttcctggctactgaccgacgagcagtttatgagctggggctggcgtgtgccatttatcttcagcgcggtgctggtcattatcggcctgtatgttcgcgtgagcctgcatgagagcccggtgtttgagaaagtcgctaaagcgaaaaaacaggtgaagatcccgctgggtacgctgctgaccaaacatgttcgcgtaaccgtactgggtacgttcattatgctggcaacctatacgctgttttacatcatgacggtctactctatgacctttagtaccgccgccgcgccagttgggcttggcctgccgcgtaacgaagtgttgtggatgttgatgatggcagttattggttttggcgtgatggtgccagtcgctggattactggctgatgcctttggtcgccgtaaaagcatggtaatcatcaccacgctgatcatcctgttcgcgctgttcgcctttaacccactgctcggttctggcaacccgattctggtttttgccttcctgctgctggggttaagtctgatgggtctgaccttcgggccaatgggtgcgctgttaccagagctgtttccgacagaagtgcgttacaccggagcaagcttctcttacaacgtagcgagcattctcggggcttccgttgcgccatatatcgcagcctggttgcagactaactacgggctaggtgcggtggggttatatctggcggcgatggctggcttgacgttaatcgccctgctgctgacccatgagacgcgacatcagagcttgtaataagagtgaaaagcctgatgcgctacgcttatcaggcctgaatttccatacaatatattgaattcgcaaggatttgtaggccggataaggcgttcacgccgcatccggcatgaacaaagcacactttgccaacaatctaaatctgtttaattgccggatgtcagacatccggcaattatcatcacttcttcatctggctcaaaatcgtccgacactgattagcctccccttcggaaggactgatcagtgccagtaacgccgccgccggtgttaccagcgttgccagtgccgcagcaacagcaccacgggcaatcagcggtccggctttcaccccagcctgcggatttttaaacgtcccccgcacatacagcgggctacgcagtgtgataatccgaattcctttactctccggatcaatagtcaaatccagctgttcgctagcaaaacttgccgtgccggtaacattaatcaacgcgttctcagtatcgaaagcaaaaatctgcgggcgcgccacgccgttggcaatattcagattcgccgccgcgcagttcacccgcacctcatcatcaccaaatatcgcaccgacaatgtagttgccgacattcagcccaacaatctccatcaggttgcggctcaccagcccgtcattcatcaacagtttcaggttgccgttactgttgcctaaaagtgccgccacgctgttaccgctaccgcgtagttccgcgtcaccgttcatttcccccagcgtcttctgcatcagttccacatcgggcatcagttctttcagtttcagtcgacgagcctgaatatctgcccgcccctgcatcggctttttatcgccttccagatgaatattcgccgcaatgctgccgcccgccatgccaaatttcagcggttgcaggcgcaggtcagcatttttgaggatgatatgagtagaaagatcgctaatcggcaggctactgccatgctcaatgcgccgccctttgaagcgaacatcggcatccataacgtcccatttatcggtttcgaagcggtcataaggcagcactttgcccgcaggctgaacgcttttttcgcccttcttctgttcagaccgtttgctcttttctgcccctttcccggaatcaacgccaatcaacggtcccaggtccgccagccgcaattgccggctctcgacatcaccttccagttttggtcgtggctttccggtggtgtagaccagagaaccgtggatatcgctatcaccaattcgcccattaaaaccgcgataatcaaagacgctgcttttttcagtgtcgattttcgctaccagccgaccatccgtttcaaacggcggggtatcgggcagcagaacgcccgtcagttcatagagatcacccagactatcgccagaaaatttaagccgtaaatcgacaccgcccatcttcattgggtcattcacgacgccatcaaaagcaacacgggtgttaccagagcggaaatcagcctgtaccggaaacggcgtcccttcgccacgcagcgccagcataccgcctatttttcccgtacccgtgagcggttcaccgttatatcgtccctgcgccttcaggccaaaaacgtaatcgcccaccttttctttatccgctttacctttgcttccagtaacttcgctgaacggcagcggcttgcctaagggatcaacaaaaatctccagatccgctttgcttactttgtcatcaatggcgatccgcccttgatcgaaaagaatattatccagccgaaagctccatgcgctcggctttgcattcgcgtctttgttatcatcgttggcaagattaaacgtccagttattgttcttttcagagaggcgaatcaggcgcgcgtcgggcttttcgagcttgatccacggcagccagaccgttttggtcagcagcgccagcggggccagcgttgcctctacgcgtggcaaatgcaccatcgtgacttcgggaatatccggtggattgccaagaatgatgtcttccgcgtgtacatggggccacggcacccagctgcgccagccagtttcttgtttttgccgctcccacaccacgcccagatcgccacggatagcgaacggacgattcaactccgcagagactttctggttgatagtcggtttgagtcgattccagtcaaaagttgcaatcaaaatgatcgccacgacaatcaacaacaagaaagccccactaatcgcagcggttattttgcctgccttgctcatcgttcgcttcctcatattcttcctgtgccagtcctaaagatagtccagccaggcggaaaatgaggcagcttatagcgccagaaccgccgtattcagcgtttctatcggtgccgggcgactaagaaaccagccttgtgcggcgaatgcggggctgttctgaacatcacgccactcttccggcgtttctacgccctcgacaatcaccccgcgacaatagcgattcattagatgtaaaagctgagaaaagagtgtgcgtccttccgggctctgacgcagcatcacaaacagttctcgcgcgattttgatgtagtcataacgcacttcacttagcgcagagaaatttgccatcccggtaccaaaatcatccagccacagcgggccaaattcacacatgctggcaaaggtactatctttcggcagacggatatgctccaccagttcgaaacgcagccagggaagacgctcaatctggcgcaggatttttggttgctgacgcagggcgatgagcgtagggccatcaatattgacgcttgccagcaggccgtgctctataaagaagtcggctttttgcgccagcaaatcaatctgctctttcacaacctccatccgatggctgacggtgatttcagtaaaatagcgatccggcggcaggcgttggctagggttcaagggatgcgtgaccaccgttaatagctccacggccattaaccgcccgcatgtttgatagatcggctgccaggtgtaagcacgctcacactgcaaccaaaaacgccgttcctgcaagctctcgatgcttgcttcagggttgcttattcgctggataacctgccttatcatcaaagatgtcctgtgtttaaaagtgatgctgcccggactcgacaaagattatcggcgcgtaagggcagaactttaccgcctggccggggtaaatttcctcactccacaacggaatctttcaggaatacgttctggctcaaaaaaataatggaacactgttttaatatggttgaccagcaaaccaccacagcgcaaactaacgctaattttttacagatcaggttcacgactatgtccaaaaagattgccgtgattggcgaatgcatgattgagctttccgagaaaggcgcggacgttaagcgcggtttcggcggcgataccctgaacacttccgtctatatcgcccgtcaggtcgatcctgcggcattaaccgttcattacgtaacggcgctgggaacggacagttttagccagcagatgctggacgcctggcacggcgagaacgttgatacttccctgacccaacggatggaaaaccgtctgccgggcctttactacattgaaaccgacagcaccggcgagcgtacgttctactactggcggaacgaagccgccgccaaattctggctggagagtgagcagtctgcggcgatttgcgaagagctggcgaatttcgattatctctacctgagcgggattagcctggcgatcttaagcccgaccagccgcgaaaagctgctttccctgctgcgcgaatgccgcgccaacggcggaaaagtgattttcgacaataactatcgtccgcgcctgtgggccagcaaagaagagacacagcaggtgtaccaacaaatgctggaatgcacggatatcgccttcctgacgctggacgacgaagacgcgctgtggggtcaacagccggtggaagacgtcattgcgcgcacccataacgcgggcgtgaaagaagtggtggtgaaacgcggggcggattcttgcctggtgtccattgctggcgaagggttagtggatgttccggcggtgaaactgccgaaagaaaaagtgatcgataccaccgcagctggcgactctttcagtgccggttatctggcggtacgtctgacaggcggcagcgcggaagccgcggcgaaacgtgggcacctgaccgcaagtaccgttattcagtatcgcggcgcgattatcccgcgtgaggcgatgccagcgtaaacgcagcatatgcaaaaggctggataaagtgttacccctctatccagctcatccataaatacctgatggttgtgctaactcatcaccatcaggcattactgtgcaggtggaatatccgtcacttcaggatgtacgtcatccgtggcgacagaggtggtcgcagcggcggtagatggggccatgatttgatcccagaccgcctgcaacgctttcatgttaaattccggctcgcctttcggctgcagcagtattaacgccatatcattgctcaactgttgacgcagatcctgatttaacatctctaccgtcaggctattaaggaaatcctgccgcagtttctgatattgctccggcgcgatatcgacaacctgattttgcaagctacgcatccgctgacccatcagaatatcggtatcagctcgtgcataggcggcaaacagtttctgcagctccagtttcttttgcgccactaacgcattgaactcttcttccggcagacctttatcgcgaaccttcgccagttcacgcgccaccagattaaggttgctgttcagcttgtcgtttggactttcgatgttgatggcacactgcgcacgcagatacagcacacggcagtcaaatccaagaccgatgtctttgctgttactggcacttaacgcttgctgaacatgccagaacagcgcctcgcgggccaggtccgcacgccagtagcgcagcagtgcggcactttcacgaatcggctgccacggcgtatcccacatgatagataaccggtcctgacgcaccgcgtcagtcataatactcaccgcttccgcacgcagcggagaaagcgtcggcaccggagctggcgtttcacgtttgcctttcagttcgccaaacgttttgtttatttggtcgacaacgctgcgcgcatccacgtttcccaccaccagtagcgtcattgcatccggggtgtaccatttctgatagaaatctttaattttttccgcttcaacgggttgtttcagcggatcggcaggatcgtgacctaacaaggtactccctttcagacgatagcgccaccagccctctttagtatcggcaggccaggttgccaccatgtcctgactttgcagcgcgtggttgatggtttctggtgtgatggtcaatttgccagtggcatttgccagataagagagcgcttctttcagcaaatcgttacggttattgggcaaactcagattaaacagcgtggtgtcataagagacaattaccggcggcatcgggcgtttagggtcgatcccctgctgccacaaactacgcgcctgtgctgcgtcaaggccaccgctttgcgttagcgcaatacgagggatggcgtgactgtaaccgctctgttgtgtactttcggcgaggctaccggtattaaccagcaggcgaatttcaacacgatcgctgggacgctggggggtggtcagcacttgccactgtaaaccgttggaaagcgtcccctgttgccatgctggatcaggctggagcgcatctgcctgcacatagccagcagtggccatcatcagcaaaccgcccgctaaaagtcgaatttttgtgccctgcatgtgaacccctgatcaactatcctggtaataaaaaaactgcccgttgtcggtcagtctaaatgacgttaaaaacacttcgtgttagaccgcaagaacatgaaaatgtcacggaagaagtgaaataaacctgaactcacccaggtggtaagttcaggcacaggggtcaattatgcgcaaacacccgcactcggggaagggagtgcgggcataagtgatgagattaagaggataattcgtgcgttttgccatccggcgcacgattattcagcacatcgtccagttttttgtggtccagttctttcacccacttagcaacgacaatggtcgctacgccgttaccgaccaggttagtcagcgcacgagcttcactcataaagcggtcgataccgaggatcagcgccagacccgctaccggcaaatggcccaccgcagagagcgtcgccgccagcacgataaagccactacccgttacccctgccgcccctttagaagaaagcagcaacacgattaacagcgtgatttggtggacgatatccatctgactgttagtggcctgggcgataaacaccgccgccattgtcaggtatatgcttgtgccatcaaggttaaagctgtagcctgtcgggatgaccagccccaccacgcttttacggcagccgagtttctccatcttgtcgagcatacgcggcagcgcgctctcggaagaactagtccccagtacaatcagcagttcttcacggatgtagcggataaatttgaagatactgaaaccagtcgctttagcgatactacccaataccagcaccacaaacaggatacaggtaatgtagaaacagataatcagctgccccagttgcaccagtgtgccgacgccgtatttaccgatggtaaacgccattgccccgaacgcaccaataggtgccagacgcatgatcatattgatgatgccgaagatgacctggctgaaactttcgatgacgttaaaaatcagttggcctttgctgcccagacggtggagcgcaaaaccaaacagtacggcaaacagcagcacctgcagaatgttaccgctggcaaatgcgccaatgacgctcgccgggatgacatccataatgaaggcgacaatgccctggtctttcgcctgatcggcgtaaaccgctaccgctttcgcatcaagcgttgccggatcgacgttcattccggcaccaggctgcacgacgttaacgatgataagaccaataatcagcgcgatggtactgacaatttcaaagtaaagcagtgcgactgcgccggtacgaccgaccgccttcatgctttccatgcccgcaatgcccgttacgacggtacaaaagatgacaggagcgatgatcatcttaatgagcttaacgaagccgtcgccaagcggtttcatttgctcgcctatttcaggatagaaatggccaaggagaataccaatggctatcgctgtcaggacctgaaagtaaaggcttttaaacagagaggttttcatagggtgtcctttagtaaaaccacaggtcttgtaaggttatggggtacctgcggccttaaaataacacccagacaacatcacagaaatgtacctggatcataattgaaacaaaaaggttaaaaagtttgagctggctcgcacaaaccagcactttttaaagttttgtaatcagtttggggtagttacttttcttccaggtaactctcttcgaagatttcaatagggagtgggcgagcaaaaaggaagccctgggcaataccaacgcccgcttttgccagccagtcgcgttgtgcttcagtctccacgccttcggcaatcatttgtaagttcaggctctgcgccagcatgataattgcagcaatcatgctgctatctcccggcaagccttcaacaaacattttgtcgattttcagtacgtcgattggcaagcttttcatatgctgcagctgacgcagccctgcgtagcccatgccgaaatcatccagcgccacccgaactccggcattgcgcagcggacggaggattgccaccgcagcatgagggtcgtcaatacgtcggctttctgtcacttccagaatcagtgttcccggctgaatgcgatagcgggttaacagttccagcatatccgccaccatattcgggtgcatcagttgcagcgcagagaggtttacgctcaagggcagcataatgccgcgctcttgccaggctgcaagcaatcgacaggactcttccagcacccagtgaccgacggtaaccatcagcccacagcactcaatgcgatcgattaagccatccggcaggtcccaactgccatccggttgctggatacgcagtaacacttccgcactgaccagtttaccgctggtcatctcgacctgtggctgtaaccaaatagcaaactgatgattttccagtgcattaaggatatcgctctcttccgtcaaccgcttctgggcggcttccatctgctgcggatcaaagaactgaatctgattcttgcctttatggcgagcggtaaatgccgcagaaatagcgcgactgtaaagctgttcggcggtgagatcgccgtagaacatcgccacgccaatgctacagtgcggacggagttgaatacgttcaatcggcaggcgctcgctcatgatagtgagcacttgctgacctaaggtgattgcgtgccacggttcctgtacaccgttggcaatgacagcaaagtcataaccgctaatctgcgcgaggatcatacgtgggctcagtacgcttttgagtttttccaccagcgtcagcagcagaatttctcgttgcgcctctttcagcacgcccgcagtatcacgcagggtttcacaggtgatgatcatcagcgcggtggtttgtttacgcgcgacaacctgctccagcatctccatcagcaaggctttgttcggcaaatcgctcaccgggaagcgcatcgcattttcgttctgttcttcataatggcgctgcagcaattgctggttgaggttgtaactgcgcaccaacataccgatttcatcgtcctgatgcagacgcggtaatgccagttggtgaccaacaagctccttggctgggatggcgttaagttcgcgagcaatattgcgtaacggatgcaaaatcaggcggttaatgcaccagctgatggcgacggtcaggataaggctcaaaagtaagtaaatggtcactaacgtactgagggtgctcatcacgaacttatacatacggaaggaatccgcctgtagtaccagataggcaattggctgcgggtttgccggacgttcgaggctgtaaacgcccaggctgatttgaaccggtagctcaaacaggcgagtaaccattaccggcaccgggcgctctggaataaaacttttacgcagcgcctggaactggttaggcagcactacatcggcacggctgaccacgcctgccggtttaatgctggcaagaatagcttccgcttcgggaatatcgcctttcaaaatagcactagataagggttcgcggacagagcgagcaatgctttccagttgcgtagccgtgttatagcgattctgctggaccagatggaacagcaaaacggtgcaaaaaataaaaacgaacaccaggacaacggctgccaccattgccatctgcttgattgttaacgagcgacttacgcgcaaattgtctccccccggaaatcccagattgccgcccgagtatacccgatcgcagcggcattaagagaggcgctatctgaaaacttaccagtcggcgtaaggtatcagcggctgcggcggtaaatccatgtcaccctgccatccggcggcggaataacgtacgtagagcaggaaatggctgggtgcgtaatctttcgcctgctggatatcaattgccgtgccaacaaaccagttggaagtaacacgtcgttcaagtaatgcccgcgccgtgtagccgaagccctgactgctgccgccatcgttggattgccgcgcagcttcttcctgccagtcggtcgggatcagattcatcagcggataacgcggcatggttttggtgcgactatggctccagctgccagacgcacccagctcccagctccagttttccgtgcgctcccgccacatcaccggtatggcaaagctcaggtattcctgcggactgtagtaaccgccctgaccgagactgtagccactcagatctttgtcgtaatgccagatcatgttgttcaggccgattgtgacgcggcgattgttctggttaatgaccttatagtaatagcccgtcatccagcgcacgcgccagttatcttcgacatttttaccggttaactggtcgccactaaggcttgcccagacgccgtttgcttcacctttatcgtagctcagacttagccccacaccgtcggcacgtacgccaccccattttttcccggtattgctcggggagtctttttgcccaccaaaggccagcaaagaactggagatgggccgacggtgggcgttaacggtgtaacccagcggcccgatatcatcgctgtaactgatgccgccgaccacatccaccacgttgaagcccatcggcgtggtaccgatatcccagctccagacgtcatttcgccagccgaccgccacgctggcaccggaatcgctctggctgcggttgccgctacagtcctgtaatgtacaggtgccccagttgtcatcccatttgccatcggcattagtggagaaactgccgacgttcatattgacgaaatcactgcgaaagaacatccgcccgtcagaatacggcgcatccacctgcaacatggtagtgtgcgctttcagatcggagtaaccaccggtgccgctgctaccccagtaatcgtgctcaagggtgacgttaagatcctgctggcgatagaggtccgccgcatcgctgcgcacgccacgtttcagccagtcatctttctcgtcgttacgggtcagtcgggtaaaggtgtcgttatcctgcggacgcgtcgtagtcacaccggatgcgaccatggcgtctttgtaggtttccagcgcctgcgttggatcgcccgcctgcgcttcaaacttcgcaccatcacgcagcaccatcgcgctttccatgctcggtggctgagattttgcctgcgggatcaacttattaaacgtccgctgcgctgctgcggtatcgccaagctgcgcctgtgccagcgccacgcgccgctgtgtgttcaggctggcgttatcggtagcgggcagtttcgccagctggctacgtgccgccgctttgtcaccggcagcaatatccacttccgtcagaccaagaatggcgtcggcgttagctggctcccgcgtcaggacattctgatatgcagcgcgggcggcggtgtaatcacgtcgttgttgcgcccagtcagccagcgtgaggtcaatacgcgtggaaggtggttgctggcgcagcatcgcttccgcttctgcctctttgccgctttctcgcaggcggttagcggtttccagcacctgatcgctttgcagtcgattaaccagctcctgaatattgctgttccactgcgcacgcggcaggctattgatatgcgccagcgccgctctgtcctggtcatgaccagagaggtacagcccgtaagcgtaaacctgctccgggtcgttgctcttctgctgcgccagattgcgcattaacgtatcggcctggctgcgttgtccggcctgccagagatcctggctaagtcggtaagtaatccatacgctgccggggtccagcgccagtcgttgccgctgaagtgctgccgcctgcgcccatttgccctggttttccagtgcctctgcctgctgtgccagacggtcgttttgcaggctgcgttcgatatcatcaatgctacgccgctgactggcagagaggctggcgataaacgcttcagctttttctgggctttgctggcggtaaatatttgccagcccgcgcacggcgttagtgttgccgctgtccatacgcaaggtctgctgataataacgttcggcggcgggataatcttttcgcgccatcgccacatcgcccagccccagcactgcataactgtcggtgttatcgacattacgcgcctgctggaacaggcgttctgcccggtcaggattattggctttcagcgcagcatcgccctgctggatcgccagccagtagcggtttactttcagcagactgttccatttgtcgttgttgctgctgtgcgggtccagtgcgagggctttttccagattcgccactgcattggcgcgatcgcctttctgagaatacgcctggcccagcgcccccagagcttcactgtctttcgggttcgcccgcaccgcctgttgtagttcgggaatggctttacccgccataccagagtccaccgccgctaaaccttgcgcacgagcgcggaaagcaggatcggccagctgtttttgctgttctgccagttggctttgcgcagccgccacgctatcgccatcactaaagatgctgagatattttttcagcgcgctcacactggcatcactgacgggcatgtctttaatctgcccgtaccagattttagaggccccttcgcgcccggcgttgctttttgccatctgttccaggacggcaaaaccttcgtcacggcgatcgctactaaacagcaatagcgccagattgttttgcaggcccgtattgcccggtgcatccgcattgatgcgttttaactgattaatcgcttcgccacggcgagccggaattttcgccaccgtactccagtactcgacagcaatgtcaccttccggcggcgcaccgttgaacagtttgttgtaactcgccacagcttcttctgcatgaccggtcgtcgcctgcaatcgtgcctgttgcagtgcctgacgaccatccggcgtggaaagtagcatcgtagtccggctgcttttatacgcattactactcggcgctaactggctcagccgatcgagctgtttttgcgcgccatcaatatcgccctgacgtaacaaagaacggaaacgggcggcaacgacgtccgggttattcggatcaataagttccagccgatataagctctgttgcaccagatcttcacgatgggtcgcttcgcctaaccgaacttgctccagcaactgttgctgagcggttggtgctgcctcgaccatcggcatgacggccagaccgagggaaagcgtgaatatgtttagtgtgaatttgcgcattcctggccccagtcaggtaattactttagtgactatttgcgcattcctggccccagtcaggtaataactcaccttttgtgctgaagcggaaacggtgttgatcccagccttgtccaaacagggtcagcacatagttgtaataggcatcgctgccgggaaagttatcggccacgcgctggcgctgaacggcctgcgcatcgcggttttgtaaaaagggcagcatggcggcagaaaaaccgactggtcctttaccctgcgctttccccgtagccacatccactttttccggcggataaccgtttttctcagtgaatgtcgccatcggtttaaaccggttgagcatccgcgctttttgcggatcgctgtcaggcatcatgcctacccacatgtaaacgcggatagcgtcgtagctgctgatcaatgttttttcggcttttagctgccagcctttgtctttctcatagcgcacccagtctgggctaaaacctttcggggcggtttccagcaataaacgttgattggtttcgcgcagcgtggtccacggcgcgccaaagcgggtgaaatactgcgccagcgtcggcggcaggtagctggggttaaaacgccagctgttatcctcagcaaaacccactttgcccggtaacaacatggaacccagcccaggcaccgtcaccacttcctcccgcgcgatacgttttagcaacgcgctgccgatgtcggtataacgctgctctttccacaaacgccccgcctccagcaagctccaggccatccagacatcaccatcggaggcgctattgctgtccagcacttcccacttactgttctctttcttgccccacagccaggcgggcaaacgttcttttaaagaaccctgagcgagattgttctgcgtccagtcgagaatattatcgaaagctgcacggtcgttagccgccagggcagagaacatgccgtaactttgcccttcggaggtggtgattttgcgcgcgtcgctggggtcgatgacgcgcccttcctgactgatgtaatcctttttaaactgctcccaggcaggccaggtacaggctgcctgaacactaaaggcagccagcagcagcatcgtcacgattccactacgcaacacattcatcttcaattactcgttatccgggttaagacgacgacgactaataattcgcagcagacgccacagtacccatgccagcaatatcacactgatagccgccagcaccgccagcagaatcggatggtttgccagcgcataccacacgcgctcgaaccacggcagatgacctacgtaataaacgtcgccaacacgtaggctgttgataccggactcgcggatcaccgcgacgctaccgaacatggtggcgcgtttgccgctatcgttcaccgcatcgttaagcatttcataaccgcgtgggctatctgccaacagcgcaatcacgctgcgctggtcgttatacgggctctggaagccaatcaccgccgccatcgcaccggaagaggtcagcgtactccgggtttctgccgcgcgatcgctctcgtccggcacaatgccggggaacggggtctggcgcatcggtgttttcacccagctttcggtcgcctgcaccaataggtcgatctgcttatcgtctttcagtttgtccgggataccaccgatgatcatgatgtcggcatctttgccctgaatggtgctgccatcatcggtcaccgtcagattaatcgccgggaagcccgtctgtgcgccgataaaaccaacagtattcagcaacgtttccatctgtgcttcgttaggcgctttcggcatcacggtgatggtttggctcagatccgccatccggctgaatgggaagcccgcgttagcaaaggcgcgtagatccggcatcgggatgaagtggtaatacttgctgaagtcgatggtggagtcgtcaccaatcaccacatgattctgcaccggctggaaggtaatacagttatccacgctaccgcccggcatcgggttcatatactcaaagtcgaagcgcagctggttggtcgcgcccagtttcagcgccggaatagagacatctgttttgccatccagcaaaccttgtaataccggaatccgcagcagcaggcggttcgcctcctgtttgctgctcaggttgaaggattgcaggaactggttattcaggctgatatccatccggctactgtctttcaccggcggcatggtgtagcggtaattaatatccatatcaatgccggtactgcgcatcaggtagagatccggcggcaggtttaggctaacgttaatcgctgctggctcaagaccgctggattgtaactgttcttcataggttttcagttcgccaaatgtgaccggacgatcggtacgtacccagttcggcgcatcgtacggcttacgcggtagcagcggtttcacttcattcactaccacgctttcaccacggaacagaatgttaccctgagcgatacctttcgctgcctgcaacaggtctttgtcgtcacgaccaaacaccaccagcagtttgacgtaaggattctgcggatggttaatcatctcaatcaccggggcttttaccgccggatgatcgcgcaggaagtccggccgtttgtcgttggttgcaaagacaatggcattgcgatccggcagttggttatagagtaccgggaagttctgcccacgccagccagaacggctaccaaaccagctggcgacaatggcagaggcttgttgcagcccaacatccggcgcacccgcaaagaccatcggcaaggtgttggtgcggttatcgctcgggtcaaagaatggcaccgggaagtgactcaggtcattcttcacattcagggtctgataggtcagatccagtccactgctccgcccaacatccagccaaagcgtggtgctggccggtttttcgcacacgtcctgataatggccgacaaactccagccgtacacggttgaagtcgctaataaacagtgggttaatgggcatttgcgccagcgtttttttacccaactgttctttggtcactggcagcacgcccatcagttcatcattgagataaacctttaactggctctggacaggcagtaagcttgggcttggggtgtattcgaagttgagcatcgccttcgtcaccacttcatcgctgcgcataccaaactcaatgctgccgttcgggttaatgccacgtagcaccatgctgcccggcggcggtgcaatttgcgcaaaggtcagcttcacatcacggctaggaccgttctgcgccacgactggcgcatcagcgccctgcacgcccggcatcacttgccccacctgcggattttgttccgtctgggcggctacagctggctcagcattgatcagtggttgcgttgctggcgtcgcctgcgtcatgaaagaggggaacgcactcatccccatagccactgcacaaatccagaatagttttcttttcatcgcgttatcatcattgttgagccaaagcctgatcgcttggttgtgccgtttcgctccgctccgggcggcgcggaataaagcttacaacccaggaaaccagagaagtcagcacacggaatatgcccttcacgctagaaggcgcaaactccgccagatggcggtagccacggaagccgagcttcagaatatccagcagactttccagcggcttatcttccgggtagctgtcctgccagagcgcccatgtatccgcacgggcaaacgtacactgcacaaaatcgatatgttgctgggtggtgagcggcattaatttcagcccaacttcattacccatcacgcgcgccacctgggtcgggaagacgtattcctgctgaccgcgtttaagcaacagattcactttctgcccttccagaatctgcgcctgaccgttgatcttgatccccaaaccaccgtcggagaaatcctgaacggtacagctgaagaggtgaccatcttcgcgggcaattgccgcgggcatcgtcatctccacgcggtggcttcggcgtacctgtttgctttctacgcttaccgcaactgcgccgccaagaacaatcaggttgtagaacacccacaccatactgacgaccacggtgagcatctcggttggcgggccatagaagtagcgccagatgcctaccgcaacgcccaccaggttgagcaggacaaggaagatgtagggccggctgatcacccagtcgacgtactcttcttccaccagtccacctttggcggtgacgttaaatttgcctttgtgcgggttaatcagcgccaccagcgtcggtggtgcgatataccacgccagcaccgtttcgtagatttcactccagaaagagtggcgatatttgccctggatcttggagttggtcaggctggcatggatcatatgcggcagcacgaatagggcgatcatcaacgctggcgcatagatgatgtaggcatgaagcagcaggaacgccagcggcgcagtcaggaagatcagccgtggaatgccgctcaagaagtggaacatggcgttgacgtaacatagccgctgagcaaacttcagccctttaccggtgagcgggttatcgagacggaagatttgtaccatcccgcgcgcccagcgaatacgctgaccgatatgcgcgctcagactttcggtcgccagccccgccgcctgcggaatacgcatatacgcggaggtatagccacgacggtgcaaccgcagagaagtatgcgcatcttcagtcacggtttcgacagcaatgccgccaatttcatccagcggcttacgacgaatcaccgcacaggaaccgcagaagaaagtggcgtcccacatatcgttgccatcctgcaccagaccatagaacagcgtgccttcgttcggcgttttacggaaacgccccaggttgcgttcaaacgggtccggactgaagaagtggtgcggcgtctgcatcatcgccagctgtttttctttcaggaaccagcccatggtcatttgcaagaagcttcgcgttggtacgtggtcgcagtcgaaaatgctcacgaactcgcctttggcatatttcagcgcattgttgatgttgcctgctttcgcatgttcatgagtggtgcgggcgatatatttcacccccacgttttgcgcaaactggcgaaactcttccctgccgccgtcatcaaggatccagatattcagcttatctttcggccagtcgatacccaggctggcgtaaatggtatttttcaccacgttgagatcttcgttgtaagtcgggacaaagatatccacgctcggccacaggctcatatctttcggcaatggcaccggctgacgattcagcggccatactacctggaagtagccgagcaccagcacaatccacgcgtacgtttcagcgaagagcagaataagcccgcacaccaggctgaccggatcgtcccagttcagcgtagaggtgtaacgccaccagatataacggcaagaaacggtcaggctcagcacaatcaacattagcgcgctgaagcgccccggcatccgccgtacgatcagcgctaccccccacagcagcatcaggaagataaactgcgccagcgggttaaacggctgagtaacgcagattaacgccagaatcaggctgaaggtgacgatgataccgaggatcaaccgccgcgccccggcactcaaatgaccgagctcttttttctcatccagatgctgtgttttatggctaacgcgctcaggcagctcgttcatccattgatggtaacgtccacgaatattttgcagaccactaaatgcccgcctgcgcggtttcggcgtttctttgcggcttgcaccgatcaataaccagcatgtttgaatgagataacggaccgggtccagcggacgcggacggctggcgttgatatgcggatacaggtttttatgttctgcgcgaatacgctgccagcgcgggtgctccagcggaataaaaatccaggccaggatcatccagaaacagccgagcgtcgcgctgaaagcgctcgcaccgtgacgacgataatcgcgataacgcccgataagccgcgcgttgaccggcgggataagcaaccaccgggtcaggatactcatgatgcactcccgactggcgtttacatcaacttgcactcccgactggcgttttcagcccggagtagttcaacaggcaccagttcgccagcgtcagtatctcttcagccgccagcgcatcactgcgatattcacctactggttgcttagccgccaggcattcagccatcgcttcatcacgatgaatgagcatcggcagtaatcggcgctggctttgcaaccaaagctggtaaatatcgtcctgaacctgactgccaatacggaagtcattaatcaaaatatgtgcgccatccggcagcgcttgctgatgcagtcggatatggcagttggcatccacattgacgattgccaggctgtgatcgcacaaactcagcagctggtgggttatctggctggcatcacgcggtaagtcgattaaaatccactggtaacgcccgctggcttttagttgctgtaagccggagcaaatatcgctcagccgggtttgccagtgctgtggattttcttgttcttcaatggataactgaccaaaaggcagcaaatcgagctggctggtgtagcgcaacccagcgtcacgccagtcctggccatccagcatcgctctggcccagccctgacggtgggtaaaatcaacattaaaactcaggcgcaacaagttgtccgggcaggcatcgaccaccaggacattttctcccaacatttgtaaactccaggctaatgcggcggtgatggttgttgtccccacgcctccccgcaccccctgctatcccagtacggccattcaccaatcccttacttttgttgcgcaaactctgccagcaacggccagcgttttaatgccgcggccaactgttcgcgttgggaaatatcggcataatcaatatcaggcagactaaatgcctgctttaacgccacaatatcattctggaagatatagcctatcgcgggatcaggcagagtatctggttcattgttattcattttgcttgatccctatgaaataaccgtaccgttcatgagacaattctaaccgtgagcatttcgccggtttattgtttacggcgagacgggaatttgctcactttttgactttccgttacgcaacagaaaaagttaaaaacgaaaagactaaaatcacacgtcttgtgaccttctaaattgattcacatgctaaatctgataagttttaatttcaatggtaggtttatttcttagctttcgctagtaaactgataatcagacaaaatggtgacatgagggacattgtggaccctgtattctctatcggtatcagtagtttatgggatgagctgcgacatatgccagcaggcggcgtctggtggtttaacgtcgatcgccatgaagatgctatcagtctggcgaatcaaacaattgcatcccaggctgaaaccgcacacgtcgcggtcattagcatggacagcgatccggcgaaaatctttcaattagatgattctcaagggccggaaaaaataaaattatttagtatgctaaatcatgaaaaaggtctatactatttgacccgtgatttgcagtgttctattgatccccataattacctttttattcttgtttgcgcaaataacgcatggcaaaacattcctgccgagcggcttcgcagttggttggataaaatgaataaatggagcaggttaaaccattgtagccttttggtaattaatcccggaaataataacgataaacaatttagtttgttgcttgaggaataccgtagtctttttggtcttgccagtttgcgttttcagggtgaccaacatttgctggatattgccttctggtgcaacgaaaaaggggtcagcgcccgtcagcagcttagcgttcagcaacaaaatggtatctggacattagttcaaagcgaagaggcggagatccaaccacgcagcgacgaaaaacgcattctgagtaatgttgctgtactggaaggtgcgccgccgctaagcgaacactggcaactgttcaacaataacgaagtcctgttcaatgaagcccgtaccgctcaggcggcgacggtggtcttttctttacagcaaaatgcgcaaatcgagccactggcccgcagcattcataccctgcgtcgccagcgcggtagtgcgatgaaaatcctcgtgcgggaaaataccgctagcctgcgcgccaccgatgaacgtttgttattggcctgcggtgcaaatatggttattccgtggaatgcgccactctcccgttgtctgacgatgatcgaaagcgtgcaagggcagaagtttagtcgctatgtgccggaagatatcactaccttgctgagtatgacccagccgctcaaactgcgtggtttccagaagtgggatgtgttctgtaatgccgtcaacaacatgatgaataaccctctattacctgcccacggtaaaggcgttctggttgccctacgtccggtaccgggtatccgcgttgaacaagccctgacgctgtgtcgccctaaccgtaccggcgatatcatgaccattggcggtaatcggctggtgctgtttctcagtttctgtcggattaacgatctggataccgcgttgaatcatattttcccattgcctactggcgacattttcagtaaccgtatggtctggtttgaagatgatcaaatcagtgccgagctggtgcagatgcgcttgcttgccccagaacaatggggcatgccgctgcctttaacgcaaagttctaaaccggtcatcaatgccgagcacgatggtcgccactggcgacgaataccagaacccatgcgactgttagatgatgctgtggagcgcagtagttgatataagatgctgtggagcgctcatcatgatgaccatcagcgatatcattgaaattattgtcgtttgcgcactgatatttttcccgctgggctatctggcgcggcactctttgcgacgcattcgcgacaccttacgtttgttctttgctaaacctcgttatgttaaaccggccgggacgttacgccgcacggaaaaagccagggcaaccaaaaaatgactcaatttacgcaaaataccgccatgccttcttccctctggcaatactggcgcggcctttccggctggaacttctattttctggttaagttcggcctgttgtgggcgggatatcttaacttccatccgctcctcaatttggtgtttgccgcgtttctgctgatgccccttccgcgctacagcctgcatcgcttgcgccactggattgccctgccgatcggctttgctttgttctggcatgacacctggttgcctggcccggaaagcataatgagccagggtagccaggtggcggggttcagtaccgattatttaatcgaccttgtcacacgctttattaactggcagatgattggggccatttttgttttattagtggcctggttattcctgagtcaatggattcgcattaccgtttttgtggttgccatactgctatggctgaacgtacttaccctggcgggaccaagtttctccttgtggccagccggacaaccgacgaccactgtaacaacgacgggtggtaacgcagcggcaaccgttgcggcgacgggtggcgcaccggtagtgggtgatatgcccgcacaaactgcaccgccaacaacggcgaaccttaacgcctggctgaataatttctataacgcggaggcgaaacgtaaaagcaccttcccgtctagcctgcccgctgatgctcagccatttgaactactggtgattaacatctgtagcctttcctggagcgatatagaagccgccgggttgatgagccatccactgtggagccatttcgatattgagttcaagaactttaactccgccacctcctacagtggcccggcggcgatccgtttactgcgcgccagctgcgggcagactagccacactaatctgtatcaaccggcaaataacgactgctatctgtttgataaccttagcaaactgggctttacccagcacctgatgatgggacataacggccagttcggcggttttttgaaagaagttcgcgaaaatggcggcatgcagagcgaattgatggatcaaacaaatctgccggttattttgctgggctttgatggtagcccggtttatgacgataccgctgtgcttaaccgctggctggacgttaccgaaaaagataaaaacagccgtagtgccacgttctacaacacgcttccactgcatgacggcaaccattatccgggggtcagcaaaacagcggattacaaagcgcgggcgcagaaattctttgatgaactggacgccttctttactgaacttgagaaaagcggtcgtaaagtgatggtggtcgtggtgccggaacacggcggcgcgctgaagggcgacagaatgcaggtatctggcctacgtgatatccctagcccgtctatcaccgacgtccccgttggggtgaaattcttcggcatgaaggcaccgcatcagggggcaccgattgtcatcgaacaaccgagcagcttcctggctatctccgatctggtggttcgcgttctcgatggcaagattttcaccgaagacaatgttgactggaaaaaactcaccagtgggttgccacaaacagcaccggtctccgagaacagtaatgcagtagttattcaataccaggataaaccgtacgttcgcctgaacggcggcgactgggtgccttacccgcagtaagaacgaaaaaggccgcagagtttcccccctgcggcctggtccgggcgcaaattgccattacggcagcctgacgcccgcatgacacgttacttccgcttgttcagccagttcacgatcatactggcaagaatgccagcaatgaccggagccgctaaatcatgccagaaggccatgcccagctctgcgaacgtcatatagccgcctgtgttgtaatgacaacgtttcgcggctattcttgagtggtctagagtcaagattagcccccgtggtgttgtcaggtgcatacctgcaacgtgcgggggttttctctctccagcaaccaatgccaccagggataaagcccccgcaacattgcgcctcaccggaacctttccggcttgccgctgattctacgattgctttttactgtcagcacccggcaatcttcctcattgcgcgatgccttccagcttaatttctttatttgcaatagttgcagttcatatccgggctgactccagactggtagtgaaatgcgcaattttgtagaattgcgcctcctcgcgacctccccagtgaatctgttgcctcattttttacatactgcgtattcgacttctccacctgttgcgcaagagaaactgggtttattcatttttgcgaggccgacttctttctggacaggactttatgcagcacaacacactaagcaaacacaatcagaaattgccgtttacacgctacgacttcggctgggttttattatgcataggcatggcgattggtgccggaaccgtgctgatgccagtacaaattggcttgaagggaatttgggtatttattaccgcagcgatcattgcttatcctgccacctgggtagtgcaggacatttatttaaaaaccctttctgaaagcgattcctgtaatgactacaccgatattatcagtcattacctggggaagaactggggaattttcctcggggttatctactttttgatgattatccacgggatttttatctactctctctccgtggttttcgacagcgccagctacctgaaaaccttcggtttaaccgatgccgatcttagtcaatctctactttataaagtcgctattttcgccgtactggtggcgattgcgtctggtggtgaacgattactgtttaagatttccgggccaatggtggtggtcaaagtagggattattgtcgtgttcggttttgcgatgatcccgcactggaatttcgccaatataaccgccttcccgcaagcctccgtctttttccgcgatgtcttgcttaccattccattttgcttcttttctgcagtatttattcaggtacttaacccaatgaatattgcctatcgtaaacgggaagcggataaagtactggcaacccggctcgcgctgcgtacccaccgaattagttatatcacgctcatcgcggtgatcctgttttttgcctttagctttaccttcagtattagccacgaagaagccgtttctgcctttgaacaaaatatcagtgcactggcgctggccgcgcaggtgatccctgggcatatcattcatatcacctctacggtgcttaatatctttgccgtactgaccgcattctttggcatttatctcggtttccacgaggccattaaaggcattattctcaatctgttaagccgaattattgataccaagaaaattaacagtcgcgtgctgactctggcgatctgcgcttttatcgtcattacgttgacgatttgggttagctttcgtgtaagcgtgctggtgttctttcagttgggaagcccgttatatggtattgtgagctgcctcattccgtttttcctgatctataaagtcgcacaactggaaaaacttcgcggatttaaagcctggctgattctgctgtacggcattttgctatgcttgagcccactgttgaagctgattgagtaaaccggagcgcatggccccggttttgtgagttaacgctgcggattttcatcctgatcaacagcaaaacaagctaccagttgaccgccgtagtcttttagctgcggctgcaactgggtgcaggggccgaagcgccgacgacagcgggcgttgaaggcgcaacccggcggtggattcagtgggcttggtagttcaccgctgagcttgatgcgctcgcggcgatcgtccgggttcaggcgcggcgtcgcggaaagtagcgcctgagtgtacggatggcgcgggttattgaagatttggtctttcgttcccttctccacgcagcggcccaggtacatcaccatcacttcatcagcaatgtgctccaccacgctcaggtcgtgggagataaagacataagacagccccaactcctgctgcaaatccatcatcagattcagcacctgcgcgcgcacactaacatccagcgcggaaaccggttcatcggcaatcaccacatccgggtcgagcatcagaccacgggcgatggcgatacgctgacgctgaccgccggagaacatatgcggatagcggtcatagtgctcggttttcaggccgactttcgccatcatgctcagggctttttcccgacgctgttctttgcttaagctggtgttgatcagcagcggctcttcaagaatttgcccgacttttttacgcggattcaggctaccgtaagggttctggaagacgatctggattttctgccgacgcagcttctgcgcctgcggatcgtgcttaagcagatcctgcccctggtaatacagctcgccaccggtgggcatttcaatcatcgtcagcaaccgaccgagggtgcttttaccgcagccagattcgcccactactgccagcgttttgccacgttcaaggttaaagctaacgccatccagcgctttaaccagacgttccggcgcgaacatgcctttcttcaccggataatgttttttcaggtcgatagcctgcaacagcggttgttgcagggtggcctcttgcgtactcatagtgtcggcctcccggcatcatcaagtgggtaatggcatttggactgacgcccgtcagcgagcatattcagcgccggttcttcagcgcgacatctgtcagtggcataggggcagcgcgggttaagcaggcagccgttcgggcggtcgtacttgccgggaacgacacctggcaagctcgccagacgttctttgtcctgagcaaattctggcagcgcacgcagcaatgcctgagtatacgggtgacgcggcgcatggaagatggcgtgcgcatcaccggtttccaccacctggcctgcatacatcacgatgattttatgtgccgcttccgccaccagcgccaggtcatgggtaattaacaccagcgccatgttctctttctgctgtagctccagcagtagttcgatgatttgcgcctgaatggtcacgtccagcgcggtggtcggttcatcggcaatcagcagttttggccgacaggcaatcgccatggcgatcatcacgcgctggctcatgccgccggaaagctgatgcgggtaaacatccagacggcttgccggatcgggaataccgacctgattcagcaggtcaatcgctcgctgacggcgggtacttttgttgccgccctgatgcaccttaatcgcttccataatctggaaacccacggtgtagcacgggttaaggctggtcatcgggtcctggaagatcatcgccacttcggcacccaccaggttgcggcgctctttttcactgatacgctgcaaatcctggccgttaaactccagtttttctgccattacgcggcccggataatcaatcagccccataatcgccagactactgacgctcttaccggagccggactcacccacaatcccgaccacttcgccctgttttacgctgtagctgatgcggtctacggcgcggaacggcgcgctttcgtcgccgaaatgcacgcttaatttatctacatttaataacgccatctcgaacctcttactgcttcagtttgggatcgagcgcgtcacgcagaccgtcacccatcaggttaaatgccagcaccgtcagcaggatcgccagacccgggaaggtcacgacccaccaggcgctttgcgcgaactgcaacacgtcggagagcatggtgccccactcaggcgttggcggctgtgcccccatgccgaggaaaccaagagcagccatatcgagaatggcgttagagaaaccgaggctcgcctgaacaatcagcggcgcaaggcagttcgggaagatgttaataaacatctgacgcatcgccccggcacccgccacgcgagacgcggtgacgtaatcgcggttaacttccaccagcacggcggcgcgggttaagcgcacatagtgcggcaaggcaacgaaggtcagtgccagcgcggcgttaccaatgctcgggccgaaaattgccaccagcaccagcgccagcagcagacttggcagcgccagcatgatatcgaccacgcgcataatgatgttatcgaccaggccgccaaagtaaccggcgatcaggccgagaataacgcccataatcaggcttaacacaactaccagacagccaaccagcaggctcaggcgcgcaccgtacatcaggcggctcagcacatcacggcctacgtcatcggtgcccagcaagtgcgccatgctgccgccttcctgccaggctggcggggcgagcagtgcatcgcggaactgttccgccgggttatagggtgcaatccagttggcaaagatcgcgatgaacagcacgatgacgacgtaaaccagcccgacgaccgcgcctttgttgcgtttaaaatagtgccagaactcctgtaacggggtcatcggcaccggtgcgctaatcactttattttcagtaacctgactcatgatgtccccttacttcttatgacgaatacgcgggttcaccacgccgtacagcagatcgaccagcaagttgacgaggataatcatcgtcgccaccagcaatacgccgccctgcactaccggatagtcgcggcgttgcagtgcgtcaatcaaccagcgtcccagaccgggccagctgaagatggtttcggtcagaatcgcccccgccagcaatgttcccacctgcaggccgataacggtcaccaccggcagcatcgcgttacgcagcgcatggacgataatcacccgcatgcgggttagccctttggcgcgcgcggtgcggatgtaatcctcgcccagcacttccagcatgctggagcgtgtcatacgcacaatgaccgccagcggaatagtacccagcacaatggcaggcaagatcatatgggcgacggcatcgataaagttgccgtcttcaccccagatggcggtgtcgattagcataaaaccggttaacggattggagtcatcgaggaacaccatatcgctcacgcgaccggagacgggcgtcaggttccagtgcacgctaaccagcatgatcagcatcatgccccaccagaagataggcatactataacctgtcagcgccaggccaaccgctgtgtgatcgaaaatggaaccgcgtttaaccgcagccagcacgccgaccggaataccgactgccgtagcaaaaatcatcgcgcagacgccaagttccagcgtggcctggaagcgcggcacgaactcttcccaaaccgggatgcggcttttcatactaatgcctagatcgccatgcataacgccccaaatgtaatggagatactgctgccacatcggtttatctaagccgagttcagccagcagctgcgcgtgacgctctggggagatcccacgttcgcccgccatgatcatcaccggatcgcccgggatcatgtggacaaaggcaaatgtgagaagggtaataccgataaacgtggggatgacgagtcccaaacgtcggagaataaactgcaacataacccggattctctatagtgacccgcagcctggaactgcgtgtctgtattgctcacaaatcaattcccgcccttatcggacagggaatgaagtattgctgccggatggcgctgcacgcagaggcacagcgccaccgggtatacagattgttgacaaagtgcgctttgtttatgccggatgcggcgttaacgccttatccggcctacaaaatcgtgcaaattcaatacattgcagaattttcgtaggcctgataagcggagcgcatcaggcatttttgcctttgccatcagtcttgtatggcttttaattattcgatagagacgttttcgaagtgatgtttgcctaatggatcaaccacatagcctttaacttctttacgtaccggttcaaacacggtggagtgagcgatgatcagtgccggagcctgatcgtgcatcaccacctgcgcttgtttgtacagttcaacgcgtttattgtggtcgtcggtagcacgcgccggttgaatcagatcttcaaacggtttgtagcaccatttactgtagttggagccttgttcagaggcggcgcagctgaacagggtggcgaagaagttatccggatccccgttatcgccagtccagcccatcattaccgtctggtgctcgccatctttcgcacgcttgaggtactcaccccattcgtaggtgacaattttggcctgcacgccgactttcgcccagtctgcctgaatcatctccgccatgcggcgagcgttcgggttatacggacgttgtaccggcatcgcccacaggtcgatggagaaacctttttccagacccgcttctttcagcaaggctttcgctttttcaggatcgtaggtgtagtcctgaacgtcgtcgttatagccccacatggttggcgggatcaggtttttcgcacttacgcccgcgccctgataaaccgctttgatgatcgcgtctttgttcaccgcgtaggtcagagcctggcgaactttcacgtcatcgagtggttttttctgcacgttatagctgagataaccgacgttcagccccggcatttccatcagattgatggatttatcctgcttcatgcgagcgatatctgccgggttcgggtacggcatcacctggcattcattcttctgcaatttcgcgtaacgcacggaagcgtcaggggtaatagagaaaaccagcgtatcgatctgcggtttggtgccccagtagccatcaaacgctttgtagcggatacgggaatctttttgatactgctgtaactggaacggaccggttccgattgggttgaggtccagtttttccggtgtaccggctttcatcatcgcatcagcatattctttactcagaatagaggcgaagtccattgccaggtcagcgaggaacggcgcttccgggcgagtcagcacaaactgaacggtgttgtcgtccacctttttcacttcactgatcagctctggcaagcccatgccttcgaagtattcgtagctgccgccagaaactttatggtacgggttttgcgcgtttttctgacgatcgaagctgaacaccacatcatcggcgttcagttcacgcgtcggtttgaattctttattgtcgtgccacttcacacctttacgcagatggaaggtataggttttaccgtcttcgctgacttcccacttttcagcgaggcccgggatcacttcggtggtgccgattttaaattcaaccagacggttataaagcgggacggaagaggcgtcataggtggtgccggaggtaaacagctgcgggttaaacccttccggagatccttcactgcaataaaccagagttttagcctgaacacttgctgcgacggtcatagccaccaggctgagaccaagcttcagcatcccactctttttcaaggaaatacgcattattctgctccaattgtgatgtttgttgttttaaccctttgcagtgggttgtcgctgcctgaccttttttgttttttgcccggtcgggtcaacgttatgaggtggggatgccgtactaattaacatcagtgtaacagtgcggatcctccataaaatgcccctcgtgacctacaatctgtcaacagaatgtgaaaacgtcaatacagccaaccgggatttacaccaacggtgagaatccacacacaaagattaaaaaaacttcaaacagctatttgcagcagagaaatttgtgctactccaacatgaccagaacaatcagcttaatatttagcaacatttggtgattaagttttatgcatttaatgaaaaaaatctgaggaaaaggtggatatctgagcgattaataccatgaacgctaaaacgcacagcggaaaatgccagggccagccataagtaacgcaaaaaaagatttaagcaaatataaaaaaagacaatggtttctgtcacaaatccgttaatggatagtgagatatggggcgcaaatttggcagggaaatgtgtgtcgtgtaggtcgaataaggcggtcgcgccgcatccgacaatggccggcacatttgcctgatgcgacgctgacgcgtcttatcaggcctacgtcgagtcgaacctccctgcccccggaggttctcatcctcatgagctgcagatgcaaaaaagcctgctcgttgagcaggcttttcgaatttggtcggtgatagaggattactcgccacttcgtggctcgccctgcgggccgttgctggcgcaacgttctctcgcttcgctcgagtcgaacctccctgcccccggaggttctcatcctcatgagctgcagatgcaaaaaagcctgctcgttgagcaggcttttcgaatttggtcggtgatagaggattcgaacctccgaccccttcgtcccgaacgaagtgcgctaccaggctgcgccaatcaccgaatgcggggcgcatcttactgcgcagatacgccctcgtcaatcccttaatagcaaaatgccttttgatcggcgagaaagtcagcaggccgcttagttagccgctgcctcttttgcctgcgggatgtgacaccagttgttgttttcgttaattccaccatccggactagtatagccaagacaacccatgatggtatcgtacagctctacgtgacggcgtggcactttcatgtcggcttcttttttcagctgcgcaaacgcctgcgcattggccggattttccagatatttatcactcatccagaccatcatcggtacgcggaactgctccggcggtgccagttcacgcggcgtgccgtgcaggtgctcgcgttcattaatactctcaccgtggtcagctgcgtagaacacaatcgctttcttatcgcgaacctgatcaatcacgctggagataaagtgatccacataggtcacgctgttgtcataggagttgatcatctgcgctttggtacagccgctatcaacaccaatacattccggcttccactgcgcgaagctacgcggataacgctgggtgtagttaaaatggctacctttggtatgcagaatgatcagatgcttaccatccgggttgcgccctaggctttgctgcatttcgtctaccagcaacatatcatctaccggcttgccacgattacgtggctccgcaccaatctgctcacgataagcaatgttgtccgccatcgtgttgctgtagaaccacatttcgctctgcatagcgtagaggtcagaactgaatcctaactgcttcagaaccgcgaaaatgttctgttcttttaatgtgcgctgcggattatcttccgcgcccccctgacgtacaaacatgcaacgcagactgagtttggttgcggtatcacaggagtaaccacggaacgccgccagatttttctcctgggccagtttcggcgtggtattacgctcatagccgaaaatacccatatggtcccaacgcgtggtttcaccgatgataaacacgacataagtgtcatcaacgttttgcggtgcctgataagtgaatttcttcgccggattaagcaaactattattatcggaagattcatcgacccgcgcccaggcatacagccccaacgcagaaagccagttacttggcagataagagttcgctacgacaccgccataactcggcaaatcaacgccggtcgccctctccactttcttctgctggatatccagcaaacgaatcggtgcccaaaccataatacccgccagtacgacgaccgccaggctgcgaatacgctgccctggggttcgcagttgtcggagcaaggtgtagcgacagcggttattccagataaggataagaggcaatgcactaacggcgattaaccagagaataaagttcagaccaacaacttctttactcaggtcgatatcggtggtcatgacggaagcgatgatgccataaccaatgaccacattaaggaaggtcatgtaatagctggcacctgcggaaaagagcaccaccaggcttgccagaatacgccagctgcggcggccaaacaggctaagaagacgtagtaaaaagaaggtcaccagtacggtggcggccagttcaacaacagcagaaatgcctttccagacggtaaaatcgtgcgcatagctgccgaagcggcggtaaaaaaccgcgccattcataaaaaggccaatatagattgcaagcaaaaagctcagcttctgctgtgtaatgcttttgatgtatctcatgcaaacaaaccctggacaaacaggtgataacaccctgcttagtggcttttcaggcccggcagggaaaaagtgcggaggtagtcagataagtaaaatctacacgcgcgaataagtagaccacagcaaagggaaaaagtgtggggaaagagtgtgcatgaagcacaaatttacaaaaatgcaagtttgaaaagagactttagcgttacaaaaagcagtaaaaagggccagttaattggcccaaattttacgagtcattgtttatacatttcgttgatgcgtttgatgcacacggaagctgaagcccagtagctcgcggctgagcattaaagggagccatgcgcctcacgcaacattttctgctctggctgacgaatcgtcgtagaaagcgccaaactcagaatcagcagggcgaaaatcacgtagaaggtcacatagaagccgccaaacagactggcgataatgctaccacaaatgctaccgataccgaaaccgagataaatcacaccgtagtttttcgccaggttattgaggccaaagaactcactgaccagactcggaaagacggtaatagtgccgccaaagttaaatgccacgcaggcaatcgctgcaaagaacgtcactgcattcaatggtgcaaacagcagggccgccatacccaccaggcttatcacctgaccaatggtaataacacggatacgggcgattttgtcagacagaatacccagcaccagacgaccactaaggttggcgatggaaataacagtgactgcattggctgcggaaaccacatcaaggtgtgccagactttgggcgatatctttcgctaccccaatcacgtacaggccgctcatgcaggcggtcaggaacattaccgctaacatccagtactgcggtttacgcatgctctctgccagcgtgtaatctttctccaccacaccattgctggttttcacttcctgttttggtgcgtctttcattaacgttgcgccgaaaacaatcatcaacagcgcaatcgctccccaaatcacaaaggttttttccagaccgaccgtttccagcagctgcgtgtcgataaatttgaaacccaggctacccagaccataagaaccgatagcgaacgcggagatcagacctttacgctccgggaaccacttcacacagttagagagcgtcagcagataacccgcgccatctgccagtcccaccagcacaccggcgcttaaccacagcatcatcaggttgtcagaatgcgctgtcaggaagaagcctaatcccagcaaaatgccggaagccatggtgacgcgtttaacgccaaaacgttcctgtaatttgcccgcaacagaagagctaattgccagccccagacttaacaagccgaaagagaaagcgacctggcttaccggcgcatccagcttggcggaaagcgcgccattaaacaggctccaggtataaacgctccccagcgcaaactgggtaatgatagtaccgatgagtgtcagccagcgggtacgctgataattactaggtgtcatggcagtattcctgcagtaataaaaaggaaaaatctctgccgacaaccataacgaagtgcactttatgcctggggaaaaacggcatgaaatgccatcagaacggaatgaaatgccttagttcaggaatgaatgacgcgacaattattcaccaaatttattatttggtaagttagcacccactatcgccacaactattgttatttaatggtttcaattgtgactgttacgttaaaatctggcgctaacccccatcgtatacagatagtcgctattattagtggtattttctgcctgagttagcgcggcataggcggcaatattttgattgagcaacatatcagcgcctacggtgacatccagccagttgccgttctggtttgtcgccgtcatccggctcaggccactttgcgccttccagatattctcgccaaattgctggttatagctgatttgcgcccagggtcggagatcgccaagccgggagtcaacacgccagcctaaggtactcacgctggcatgccataacggatcggtcagcgtggtagtactgtcgccaaactcgttatacatgctggtggttgtgccatcgtaatgtaatgccgcgaccgggccggttgtaacctgttcatataaaggaaaattccagcccatactcatactgctggtcacatccacaggggtttcttccgccagattgacttccagtcccagcgccctttggctactttgaatacgttggctcaaaatatcgttgtaatcaggttgatgatcactatcccaggtgtaacgctctgtggaaagtccgggttgcgtatcaacgatatattcttgttgccaggcgtaagctgtgttgagaaaaaaggcactgattaccacgctcgccagcaggcttagctgccagcgaccaccgcttttttttatgatcattaacacgactccagggaagagccgaattcggcaatattattgtcattgtatgaaggatatcgggcatagtagccctgtattaaatattgactttttcaccgatgcgtcaagaaaagcggctgaaatttttacgatcgggtacatagcgagggaaagtatggaacgttgcggctgggtgagtcaggacccgctttatattgcctaccatgataatgagtggggcgtgcctgaaactgacagtaaaaaactgttcgaaatgatctgccttgaagggcagcaggctggattaagctggatcaccgtcctcaaaaaacgcgaaaactatcgcgcctgctttcatcagttcgatccggtgaaggtcgcagcaatgcaggaagaggatgtcgaaagactggtacaggacgccgggattatccgccatcgagggaaaattcaggcaattattggtaatgcgcgggcgtacctgcaaatggaacagaacggcgaaccgtttgtcgactttgtctggagctttgtaaatcatcagccacaggtgacacaagccacaacgttgagcgaaattcccacatctacgtccgcctccgacgccctatctaaggcactgaaaaaacgtggttttaagtttgtcggcaccacaatctgttactcctttatgcaggcatgtgggctggtgaatgatcatgtggttggctgctgttgctatccgggaaataaaccatgattcgggaagcgcaacgtagtgaactccccgcgatcctcgaactgtggctggaaagtacaacctgggggcatccctttataaaagcgaattactggcgtgactgcattccgctggtgcgggatgcctatcttgccaacgcgcaaaactgggtctgggaagaagacggtaagcttctcggttttgtcagcattatggaaggccgatttctggcagcgatgtttgtcgcaccgaaggccgtcaggcgcggtattggtaaggcgctgatgcagtatgtgcagcagcgccatccccacctgatgctggaggtttatcaaaaaaatcaaccggcgataaatttttaccaggcacagggttttcacattgtcgattgcgcatggcaggatgaaacccaactacccacatggattatgagctggccggtggttcaaacgctgtaattaactgctggccggtggttcaaacgctgtaagtgtcagttccggaccgttgtatttttccagccatgccagcgccgtattacccgcacagccattccccagccggctgctggggagatctttggtcagcacgttcactgcgccgtttttacaaataccgtcagcggttaaatccagatccggccatgccccttcgtgaatgcaaatcacgccaggtttaattccctcgctaatgaccgctccggcaagaatttgcccgcgtgcgttccacaaccgaacagtatcgccatcttgtatgccgcgctcctgggcatcgtcaggatgaatggtgacaggctcacgatttgccaccgcgtacaattcgcgcagagaactgtaattcagctggctgtgcaggcggtgcgccggatgggcagaaagtacctgcaactgttctggttcggcattgccctgccattcgtccggctccagccacattggatgcccagggcaatccgggtaaccgtaatcggcaatacgctgactgaagatttcaatcttgccgctggcggtttttaacggatgcgccagcggatcgcggcaaaaatcagcgaagcgaataaaccgctcgctgtccgggttttccggcatctcaattaactggttggcttgccagaactcagcaaatggcggcaattcaacctgctggcttgccccgcgctgtcgggcaacgttataaaacgtttccagccattgcagctcactttttccttccgtaaaacgtgcataaccgcccttctcccagcgttcacttaactcggcaaaaacatcaaaatcattacgcgcttcatagcgtggcggcaccacttgcttcatcggcaccagatgctgattactgtaatcaccggtcatggtgagatcattacgctcaaaagaggtagtcgcaggcagaacgatatccgcgtgttttgccgccgccgtccagaagcattcagagatcaccaccagctccggtttttgccaggcacggatcaggcgattggtatcctgatgatgagtaaagttggcaccgcccgcccaccagataaaacgaatatccgggaaatgtcggttcataccgttgtgttgatatgcgccaccagggttttccagtgcttcaacaatgcgggcaacagggattttatccaccgcatcgcagccacccggcaagctgccctgcatggaagagagcaccgcagaacgccgcgtggggttaccaccattggcaaaatggtaagaaagaccaaaaccgccgccgggtgtgccgatttgccccaacattgctgccagcgtgacgatcatccagtgtttttgctcaccaaactgttggcgctgcattccccagcctgccatcagcatggtggtattttggtggaaaatagccgccagctcgcggattttcgctgcgccaacaccacaaatctctgctgcccattcggcggttttcgctattccgtcactctcgcccagcaaataagaggcgaagacggcataacctgtggtgcaacgcgccagaaacgcttcgtcgtgccaaccattttccaccagcgtatgggcgatccccagcatcagcgcaacatcggtgcccatgtgcggtgccacccactccattttatcgccaaagaaatcgacggtttcgcttcgcattggatcaatgcagatcagctttttcccgctgtcacgcagtgcagaaaagtaagaaagcccctgctcatcggatgcattccacgcaattttcagcgtattgagtgggttagcactccacagcaccacgacatcgctatgttccagcaccagcggccaactggtctgctgttgataaacttcactaccacccacgacatacggcatgatcgcctgtgccgcgccggtgctataatcccccagatgcccggtataaccgcctgccagcgccatatagcgttgtaataatgtgctggccttatgcagcacgccgttactacgccagccgtaggaaccagcaaaaatgcttgccggaccataagcctcacgaatgcgtttatgttgttggtgaataagatccagcgcctcatcccaactcacgcgaacaaattcatcctgcccacgaatgccttgcgggttttccggactcgcaagaaagccttttcgcaccattggaaatcgtacccgcgtattgctgtgaacctggtcgcgaaccgcgctctgcaaggagttttccattcctgtggctaacgcgccacggctgctaaacacggtttcgccgtcggtttcaaccagcatgggcccccaatgggcggcagtcagaacggaatatcgtgaggatgagttggccaaaccgaagactcctgaaaggttagatgtattgagcagttaaatattacttacaaatttccgagtattcccaggaataatcttcatgttcacgcggcataatctcccgccacggaacccgtggcaaagaataaaaaggttattaaggattaacaatgaagaaacgtgtttatcttattgccgccgtagtgagtggcgctctggcggtatctggctgcacaactaacccttacaccggcgaacgcgaagcaggtaaatctgctatcggcgcaggtctgggctctctcgtgggcgcgggtattggtgcgctctcttctagcaagaaagatcgcggtaaaggcgcgctgattggcgcagcagcaggcgcagctctgggcggcggcgttggttattacatggatgtgcaggaagcgaagctgcgcgacaaaatgcgcggcactggtgttagcgtaacccgcagcggggataacattatcctcaatatgccgaacaatgtgaccttcgacagcagcagcgcgaccctgaaaccggcgggcgctaacaccctgaccggcgtggcaatggtactgaaagagtatccgaaaacggcggttaacgtgattggttataccgacagcacgggtggtcacgacctgaacatgcgtctctcccagcaacgtgcggattccgttgccagcgcgttgatcacccagggcgtggacgccagccgcatccgtactcagggccttggcccggctaacccaatcgccagcaacagcaccgcagaaggtaaggcgcaaaaccgccgtgtagaaattaccttaagcccgctgtaatccctttcatgccaggtgatgcagaaatcacctggcattcttcagttttccttcatcatatttcaggctaaggtgatcgccttatcagtgaatggagagaagcatgaagccgtccgttatcctctacaaagccttacctgatgatttactgcaacgcctgcaagagcatttcaccgttcaccaggtggcaaacctcagcccacaaaccgtcgaacaaaatgcagcaatttttgccgaagctgaaggtttactgggtagtaacgagaatgtaaatgccgcattgctggaaaaaatgccgaaactgcgtgccacaagtacgatctccgtcggctatgacaattttgatgtcgatgcgcttaccgcccgaaaaattctgctgatgcacacgccaaccgtattaacagaaaccgtcgccgatacgctgatggcgctggtgttgtctaccgctcgtcgggttgtggaggtagcagaacgggtaaaagcaggcgaatggaccgcgagcataggcccggactggtacggcactgacgttcaccataaaacactgggcattgtcgggatgggacggatcggcatggcgctggcacaacgtgcgcactttggcttcaacatgcccatcctctataacgcgcgccgccaccataaagaagcagaagaacgcttcaacgcccgctactgcgatttggatactctgttacaagagagtgatttcgtttgcctgatcctgccgttaactgatgagacgcatcatctgtttggcgcagaacaattcgccaaaatgaaatcctccgccattttcattaatgccggatgtggcccggtggttgacgaaaatgcactgatcgcagcattgcagaaaggcgaaattcacgctgccgggctggatgtcttcgaacaagagccactgtccgtagatagcccgttgctcagtatggccaacgtcgtcgcagtaccgcatattggatctgccacccatgagacgcgttatggcatggccgcctgtgccgtggataatttgattgatgcgttacaaggaaaggttgagaagaactgtgtgaatccgcacgtcgcggactaagccgcgactgcgtagagtaaagcccgataatcgctcgggcttttactctttattgggttgcagtaactgctgtagtccaggcctgattaaacgcctgatgctgtgccggtaatggcgcaatcagtttgttatattcacttgcctgctgactagtcgggaactggatgccatttgcgacaaagctcacctgagtaccttgctgagcaatgtagtctccaaccatcaccagttgttgcgtgaaagtttgtgccgccggaatcaacggttgcaatgcatcagctggcgtcgttaccactttggtgaatgcctgatcaaagaccggtttcaaatcatcgctctgttttagcgcagagtgcgcagcatcggcctgcaacttcgcattttgcagttgttgcgccagcacacccaggctaccgttcatttcacgcagcggaccgctttgcgtaacgtaatcctgcggtacgcgaattgcgttaacgctgtctacaaccgggcgcagaccggaatccatcgcctgattcacctgctgagaataaccatacagaatcgcgtaatcagagacaaaaggaccaaactgttttttctgatcggcagtcagggttggtagacgttcaccgctacgcatcactgtattctgcaggaagtcgataaacgctttacgctgatcgccttctttatcaaaacacccactcaggctaactaccattaataacgccgcaagaggcgcaaaccagcgagagcaggactttcctgtcgccattttcttactcctttcacccaaaaaaagcgcacaacgacacacgcgtgtctgacgtgacaaggatagtccaggacaggcttgcaggataccctttctacgtaatcttcctggtaaaatcatggagaaaatgaaacaaggttaatttgttgtttcattgttaaaaaatgatagtgccgttgccttttttgtagccagagatttacgccttcgcagaaggttagattttcgaaatctttacaaaacaggagtggtaagagatatatcggcatttatcagatcgttaggtggctataagtcacgctaaatgacaggctgaatcgaatcatagccagagcatgccctgacttcaccccgctgtgtctgcttttcccgactattcttaatgagcttcgatgcaattcacgatcccgcagtgtgatttgaggagttttcaatggaatataaagatccaatgcatgagctgttgagcagcctggaacagattgtttttaaagatgaaacgcagaaaattaccctgacgcacagaacaacgtcctgtaccgaaattgagcagttacgaaaagggacaggattaaaaatcgatgatttcgcccgggttttgggcgtaagtgtcgccatggtaaaggaatgggaatccagacgcgtgaagcctagtagtgccgaactaaaattgatgcgtttgattcaagccaacccggcattaagtaagcagttgatggaataaacttttatccactttattgctgtttacggtcctgatgacaggaccgttttccaaccgattaatcataaatatgaaaaataattgttgcatcacccgccaatgcgtggcttaatgcacatcaacggtttgacgtacagaccattaaagcagtgtagtaaggcaagtcccttcaagagttatcgttgatacccctcgtagtgcacattcctttaacgcttcaaaatctgtaaagcacgccatatcgccgaaaggcacacttaattattaaaggtaatacactatgtccggtaaaatgactggtatcgtaaaatggttcaacgctgacaaaggcttcggcttcatcactcctgacgatggctctaaagatgtgttcgtacacttctctgctatccagaacgatggttacaaatctctggacgaaggtcagaaagtgtccttcaccatcgaaagcggcgctaaaggcccggcagctggtaacgtaaccagcctgtaatctctgcttaaaagcacagaatctaagatccctgccatttggcggggatttttttatttgttttcaggaaataaataatcgatcgcgtaataaaatctattattatttttgtgaagaataaatttgggtgcaatgagaatgcgcaacgccgtaagtaaggcgggaataatttcccgccgaagactcttactctttcaatttgcaggctaaaaacgccgccagctcataactctcctgtttaatatgcaattcacacagtgaatctcttatcatccaggtgaaaaataaaagcgtgaaacaaatcactattaaagaaagtaatctatatttctgcgcattcccagcctcctgtgttgatttccaacgagtataactttgatttatagtcaggtggggcttttctctgtctgcctttcggtgaatacctgagacaaacagtctcaagcacccgtggctattctagcttaataagtttgtttcttctccttgatataatcctaaaaaaatctcataaaattaatatatgagataatctttattcagcagaagattattaaaggttgctgtattatttagcgataaaaaaagcctgccagatggcaggctatttaataacggcgttattattgcaacaggctaatatccgcaacgcgcaggaacagttcgcgcagtttctccagcatggtcagacggttgatacgcaattctttgtcatcaaccatgaccatcactttatcgaagaaagcatcaaccggttcacgcagctcagccagttcgaccagcgcatcctggtaacgaccttccgtaaagtacggctccagcttgtcacgtagcaccacaacctgcatcgccagtttaatttcttccggctctttcagggtagaggcattcacgcggtcgctcagcacttcgtcagatttcgccagaatgttagatacacgtttgttcgccgccgccagtgcagcagctgcatccagggtacggaaatggcttaccgctttcatacgggcatcgaaatcagccggacgagtcggacgacgcgccagtaccgcctggatggtgtcaacggtataaccttcgtcctgataccaggcgcggaagcgaccgagcataaagtcgataacatcatcaactacgttggcattagtcagcttatcgccatacagacgcaccgcttcttcggtcagcgtttgcagatcaaggttgaggttcttctcaacgataattcgcagcacgccaagcgcggcacgacgcagcgcaaacgggtctttgtcgcctttcggatgctgaccgataccgaagatacccgccagggtatccatcttgtcagcaatcgccagcgcacaagctactgggttggacggcaggtcatcaccagcaaaacgcggctgatactgctcattcagcgccaccgcgacatcttccgcttcgccatcgtgacgcgcatagtgcatccccataacgccctgggtgtcggtgaactcgaagaccatgttggtcatcaggtcgcacttagacagcagacccgcacgggtagcgtggttaacgtcagcgccaatctgttcagcaatccagccagccagcgcctggatgcggtcagttttgtcgcgcagcgtccccaactgttgctggaacaacacggtttgcaggcgcggcaggttatcttcaagacgttttttacggtcggtgttgaagaagaactcggcatccgccagacgcggacgaacgactttctcgttaccggagataatctgctgcggatctttgctttcgatgttggcaacgaagataaagttcggcagcagtttgccgtcgttcgcatacaccgggaagtatttctggtcacctttcatggtgtaaaccagcgcttcagccggcaccgcgaggaatttctcttcgaattttgcggtcagaacgaccggccactccaccaggctagccacttcttccagcaggctttcgcttaagtcagcgttaccgccaatcttacgcgctgcttcttcggcatcggctttaatcttcgccttacgttcttcgtaatcggcgatgactttcccacgctcacgcagaatttccggatactgatcggcgttatcgatggtgaattccggctcgcccataaagcggtggccgcgaatcacgcgatcggactgaatgcccagaatggttgccggaatgactttgtcgcccagcagcagggtcacggtgtgcaccggacgcacgaagtgcacgtcgcttgcgccccaacgcatcagtttcgggatcggcagtttcgccagagaagtcgcaaccatattcggcagcagtgcttcggtgctttcgcccttcacatgggcgcgatacagcagccattcgcctttatcggtagtcagacgctcagcctggtcaacggtaataccgcaaccacgcgcccaaccttctgccgctttgctcggtttgccttcagcgtcgaacgcctgggcaatcgccgggccgcgtttttcgatttcacgatccggttgcgcttccgccaggttagctactttcagcgccagacgacgcggagcagcaaaccattgaacggtgccgtgtgcgaggccagcgttatccagctccgcagtaaagttcgcagcaaaggactcagccaggctgcgcagtgcttttggtggcagctcttcagtgccgatttccaccagaaaagttttctcagacatagccgcctcttacttatctttgttgcacatcgggaagccgagggcttcacgggaagcgtagtatgcttctgccactgctttggtcagggtgcgaatgcgcagaatgtagcgctgacgctcggtgacggagatggctttacgcgcatccagcaggttgaagctgtgggcggctttcagaatacgctcgtaggctggcagcggcagcggattttccagcgccagcagctgctgcgcttctttctcgtactgctcgaagcaggtgaacaggaagtccacatccgcgtattcgaagttgtaagtggactgctccacttcgttctgatggaacacgtcgccgtaggtggttttacccagcgggccgtcgctccagaccaggtcgtaaacgctgtctacgccctgaatgtacatggccagacgttccagaccgtaggtgatctcgccggtaaccggtttacactccagaccaccaacctgctggaagtaagtgaactgcgtcacttccatgccgttcagccacacttcccagcccagtccccaggcacccagcgtcgggttttcccagttatcttccacgaaacggatgtcgtgaatagtcgggtccatgcccagctctttcagagaaccgaggtacagctcctgaatattgtccgggcttggcttaatgaccacctggaactgatagtagtgctgtaaacggttggggttttcgccgtagcgaccatcggtcgggcgacgagaaggctgaacataagcagccgccatcggttctggccccagctcgcgcagacaggtcattgggtgagaggttcccgcgccgacttccatgtccaatggttgaacaatggtgcagccctggcgagcccagtaatcctgtaaggtcaggatcaagccctggaaggtcctggtatcaaacttttgcatattatttcgtgctggatacgtgtggatttaaaggaagggatcagtatacccgctggatggaagatatacagtacgaaacgggaaaaagcagggcttaacgcatggaaagatgcaaaaaatggccatccgcgtcaaaagaacagacaaactgctctttacggaaggtataaccgcgcatttcatagcttccctggaactgttcgaaggcggtgacgtcgattttttgctcgccggtgttataacgttttgccgcctgatccttgcataacgcttccatattcaagctacgcagaggatcaacctttacccgttgtgctttctgcacgggactcggtatagaacaacccactagcaccataagcgccattgccggaaagaaagcgttcatcatcattaaattaccgtctggtttgcaggtgagtcttattatttatatcggtatagtggctgatatcttacgaatttccttaagcctctataagctgtagtgataaaactcagattattccagtgcgccaaccaaatgatttatcggtcagactttttttaaccagatacagagacacagatgcagcccaaaatttactggattgataacctgcgagggatagcgtgtttaatggtggtgatgattcacaccactacctggtatgtgaccaatgctcatagtgttagccccgtcacatgggatatcgccaatgttctgaattctgcctctcgtgtcagcgtgccgctatttttcatgatttccggctatctcttttttggcgaacgcagcgcccagccgcgccatttcttgcgtatcggcttatgtctgattttttatagcgcaatcgcactgctctacattgcgctgtttacctccatcaatatggagttagcgctgaaaaacctgctgcaaaagccagtgttttaccacttgtggtttttcttcgcgattgcggtgatttatctggttagtccgctgattcaggtgaagaacgtcggcggaaaaatgttgctggtgctaatggcggtgattggcattatcgctaacccaaacacagtgccgcagaaaattgacggttttgaatggctgccaattaacttatatatcaatggcgatactttttactacattctgtatggcatgttgggccgcgctatagggatgatggacacacagcataaagcactgagctgggtgagcgccgcgctgtttgcgacgggggtttttattatctctcgcgggacattatatgaattgcagtggcgcggaaattttgccgatacctggtatctttactgtgggccgatggtttttatctgcgcaatcgcgctattgactctggttaaaaacacgctggatacgcgtaccattcgcggacttggcttaatctcccgccatagtttgggtatatacggattccacgccttgattatccatgcgctgcgcacccggggaattgagcttaaaaattggccaatactggatattatttggatcttttgcgcgacgttggcagcgagtttgttactttctatgctggtacaacgaatcgacagaaacagattagtgagttaagtaaaagcccggtcacattggactgaccgggcttacgtgagttattcgctgtattcttcctgggtaacctgtgtttcttttggtgggtttattccggcatcacgaatatttttctgcaccgctactgcaccaaacaagcttaagaagaaagccagtccataaaaacctttttcgctgagtaataatgtcgcattccacagacctaccatcagtaatgcaacagagataataaagacagtcaggcaggtcatataataaatggaagtggtcggtatgccttcatacttgtcccgaacggtcttttgataagacgccgcagaaaacagtcctaataccagtacggcaaaataatatcctttttcatttaactgcatctctgcattccatagccctaacagataggtaacgataccaccaacgagagctatccaactcacaatactaaaggccggactataggtacttattttgttgtccatcacagtattcctttcattcctgaatatgtaagagctttatgttgctcatgcgctgcgaaacaaacgcatttgaccaaacaagcagacaaaaaaggcgatgggatagatcaccatttcataagtattgataggtgcgtttaaaacaccgataaacaagagaccgatagtgattaacgcaactaactggcagatatgggtaaaaaaatcatccagttgcccgagtttttctgcgcgaagatatgcatagttgccaaaagttgctgtcattaacacgccaagaaaatagccttttccacttaacaatgggcaactgatccatagcccaaccagataaaccagcgccccgacaacaaataatagtttcgccacagtcttactggttttcataacgatctccatatctaccagcgatacattacgagtaaccaacgaaagacaaaactgaaaaatgccattaacaaatgattttcagaataaattcatactaaatattaattaattactgagatatatagatgtgaattatcccccacccggtcaggcaggggataacgtttacgccattaatggcagaagttgctgatagaggcgacggaacgtttctcgtcgtggctgataagcggcataacgctgcgcatctggtagatggctctgttctaacggtagttgcggcaacaattcaatgaggcttttctctggattcgccgcgatctgcgccagccttgctgcgcccagtgctggccccacatccccccccgtacggtaatcgagctgctgaccgctgatatccgccagcatctgacgccagtactcactacgcgccccgcccccaatcaacgtaacactttgcggtttaataccgcaggcatgcacgacatccatgccatctgccagcgcataacccacgccttccagcactgctcgcgccagttcattggggccatgttgatgagtcaaaccaaagaaaacccccttcgcctggggattattgtgtggcgtacgctcgccggaaagataaggcagaaaccaaactggctcggcactttcatcagcctgttgagctgcagcgattaaagctgggacattgctcaggccggttaatttcgcggcccaatccagacagctcgctgcactcagcatcacagacattaaatgccaacgttgcggtagcgcatggcaaaagctatgtacggcgctttctggcttgcttaagaacccttcgctgacagcaaaatagaccccgctcgtccccaggcttaacattgcctgattagcatcaaccattcccacaccaactgcaccagctgcattgtcgccaccgcctgcgacaactggcaccgtcgccataccccacgctttcgcaacttcaggtaacaaagcaccagtaatttcgctgccttcgtataatgcgggcatctggtcacgagataagtcgcaagcctgcagcatgacgtcactccagtcacgctttgcgacatccagccacatggtgccagctgcgtcagacatatcgctggcaaactcccccgtcatacgcagacgcaagtaatctttcggtaataatactttgtcgatttgacggaatatctccggctcatgccgctgaacccatagcaatttaggcgcagtaaatccgggcatcatcaggttgccggtaatcacccggctttgcggaactcgcgcttccagcaaagtgcactcttgcgcacagcgcccgtcgttccacaaaatggcagggcgtaacacccgttgctgagcatccagcaaggttgctccgtgcatctggccggcaatacccaatgctttaacgtcctgcagagaatgctgatcgcccagagctttcattgcgcgatcagttgcctgccaccactgttccgggtcttgttcgctccagagtggatgcgggcggctaacggtcagcttttccgtttgcgcagcaaccacctcaccctgctcgttgagcaaaataacttttacgccgctggtgccaagatctatcccgatatacatatcgatcgttccttaaaaaaatgcccggtatcgctaccgataaccgggccaacggactgcacagttagccgttatttgtcgaacagataatggtttaccagattttccagttgttcctggcgaccactctgatgcaccggagacaaatgatgttcctgagcatatttggctaaatctgccagactcatttggcctttcaggatttgctggcccaattcgctattccagccggaataacgctgcgcgatgcgtttatccagctcgccatcttcaatcatgcgcgctgcaattttcagcgccagtgccatcgtatccatcgcgccgatatgaccgtaaaacagatcatatttatcagtactttgacgacgtactttggcatcgaagttcagaccaccggtggtgaaaccgcctgctttgagaatttcatacatcaccagcgcattctcttccacactgttcgggaactggtcggtgtcccagcccagttgcgcatcgccacggttggcgtcgacagaaccgaacaggccaagcgcaatggcggtggctatttcatgatggaaagagtgacctgccagcgtcgcgtggttagcttcaatgttcagtttaatctctttttccagaccaaactgtttcaggaagccatagaccgtcgcggcatcgtaatcatattgatgtttggtcggttcttgcggtttcggttcgataagcaacgtgccctggaaaccgattttatgtttatgctcaaccaccatctgcataaagcggcccagttgttcacgctcctgacgcaagtcggtatttaacagcgtttcgtaaccttcacgaccgccccacaggacatagttttcaccgcccaatttatgggttgcttccatcgctgtaacaacttgcgttgccgcccagctgaagacttcaggatctgggttcgtcgccgcacccgcgccgtagcgagggtttgtaaagcagttggccgttccccacagcagcttcacgccgctctcttcttgcttgcctgccaggacatcaaccatttgcgcaaaattattgatgtactcttttaagctcgcgccctcaggggaaacatccacatcgtggaagcaataaaatggcacatgtaacttgtggaaaaactcaaatgcgacatctgctttacgcttcgccaacgccagtgcctcaccaggctgctgccacggacgattaaacgcccccacaccaaacatatccgccccgttccagcagaaggtgtgccagtagcaggcggcaaaacgcaagtgctcttccatacgcttacccaacaccagttcgtcgggattgtagtgacggaatgctaacgggttactggatttactgccttcataacgaacgcgatcgagctggtcaaaataggcttgcatattgaactccataatcaggtaatgccgcgggtgatggatgatgtcgtaatattgggcactccctttcagttgctcaattatgttatttcacactgctattgagataattcacaagtgtgcgctcgctcgcaaaataaaatggaatgatgaaactgggtaattcctcgaagagaaaaatgcaataagtacaattgcgcaacaaaagtaagatctcggtcataaatcaagaaataaaccaaaaatcgtaatcgaaagataaaaatctgtaattgttttcccctgtttagttgctaaaaattggttacgtttatcgcggtgattgttacttattaaaactgtcctctaactacagaaggccctacaccatgaaaataaagaacattctactcaccctttgcaccagtctcctgcttaccaacgttgctgcacacgccaaagaagtcaaaataggtatggcgattgatgatctccgtcttgaacgctggcaaaaagatcgagatatctttgtgaaaaaggcagaatctctcggcgcgaaagtatttgtacagtctgcaaatggcaatgaagaaacacaaatgagccagattgaaaacatgataaaccggggtgtcgatgttcttgtcattattccgtataacggtcaggtattaagtaacgttgtaaaagaagccaaacaagaaggcattaaagtattagcttacgaccgtatgattaacgatgcggatatcgatttttatatttctttcgataacgaaaaagtcggtgaactgcaggcaaaagccctggtcgatattgttccgcaaggtaattacttcctgatgggcggcagcccggtagataacaacgccaagctgttccgcgccggacaaatgaaagtgttaaaaccttacgttgattccggaaaaattaaagtcgttggtgaccaatgggttgatggctggttaccggaaaacgcattgaaaattatggaaaacgcgctaaccgccaataataacaaaattgatgctgtagttgccagtaacgatgccaccgcaggtggggcaattcaggcattaagcgcgcaaggtttaagtgggaaagtagcaatctccggccaggatgcggatctcgcaggtattaaacgtattgctgccggtacgcaaactatgacggtgtataaacctattacgttgttggcaaatactgccgcagaaattgccgttgagttgggcaatggtcaggaaccaaaagcagataccacactgaataatggcctgaaagatgtcccctcccgcctcctgacaccgatcgatgtgaataaaaacaacatcaaagatacggtaattaaagacggattccacaaagagagcgagctgtaagcgttacgccccagcgcggagcgggggcgtgatttctctccatgccgcgtgaatgaattggcttaggtggagtcgttatgccttatctacttgaaatgaagaacattaccaaaaccttcggcagtgtgaaggcgattgataacgtctgcttgcggttgaatgctggcgaaatcgtcagtctttgtggggaaaatgggtctggtaaaagtacgctgatgaaagtgctgtgtggtatttatccccatggctcctacgaaggcgaaattatttttgcgggagaagagattcaggcgagtcacatccgcgataccgaacgcaaaggtatcgccatcattcatcaggaattggccctggtgaaagaattgaccgtgctggaaaatatcttcctgggtaacgaaataacccacaatggcattatggattatgacctgatgacgctacgctgtcagaagctgctcgcacaggtcagtttatccattagtcctgatacccgcgttggcgatttagggcttgggcaacaacaactggttgaaattgccaaggcacttaataaacaggtgcgcttgttaattctcgatgaaccgacagccagtttaactgagcaggaaacgagcattttactggatattattcgcgatctacaacagcacggtatcgcctgtatttatattagccacaaactcaacgaagtcaaagcgatttccgatacgatttgcgttattcgcgacggacagcacattggtacgcgtgatgctgccggaatgagtgaagacgatattatcaccatgatggtcgggcgagagttaaccgcgctttaccctaatgaaccacataccaccggagatgaaatattacgtattgaacatctgacggcatggcatccggttaatcgtcatattaaacgagttaatgatgtcagcttttccctgaaacgtggcgaaatattgggtattgccggactcgttggtgccggacgtaccgagaccattcagtgcctgtttggtgtgtggcccggacaatgggaaggaaaaatttatattgatggcaaacaggtagatattcgtaactgtcagcaagccatcgcccaggggattgcgatggtccccgaagacagaaagcgcgacggcatcgttccggtaatggcggttggtaaaaatattaccctcgccgcactcaataaatttaccggtggcattagccagcttgatgacgcggcagagcaaaaatgtattctggaaagtatccagcaactcaaagttaaaacgagctcccccgaccttgctattggacgtttgagcggcggcaatcagcaaaaagcgatcctcgctcgctgtctgttacttaacccgcgcattctcattcttgatgaacccaccaggggtatcgatattggcgcgaaatacgagatctacaaattaattaaccaactcgtccagcagggtattgccgttattgtcatctcttccgaattacctgaagtgctcggccttagcgatcgtgtactggtgatgcatgaagggaaactaaaagccaacctgataaatcataacctgactcaggagcaggtgatggaagccgcattgaggagcgaacatcatgtcgaaaagcaatccgtctgaataacgcattgaggagcgaacatcatgagcaaaagcaatccgtctgaagtgaaattggccgtaccgacatccggtggcttctccgggctgaaaagtctgaatttgcaggtcttcgtgatgattgcagctatcatcgcaatcatgctgttctttacctggaccaccgatggtgcctacttaagcgcccgtaacgtctccaacctgttacgccagaccgcgattaccggcatcctcgcggtaggaatggtgttcgtcataatttctgctgaaatcgacctttccgtcggcagtatgatggggctgttaggtggcgtcgcggcgatttgtgacgtctggttaggctggcctttgccacttaccatcattgtgacgctggttctgggactgcttctcggtgcctggaacggatggtgggtcgcgtaccgtaaagtccctagttttattgtcaccctcgcgggcatgttggcatttcgcggcatactcattggcatcaccaacggcacgactgtatcccccaccagcgccgcgatgagtcaaattgggcaaagctatctccccgccagtaccggcttcatcattggcgcgcttggcttaatggcttttgttggttggcaatggcgcggaagaatgcgccgtcaggctttgggtttacagtctccggcctctaccgcagtagtcggtcgccaggctttaaccgctatcatcgtattaggcgcaatctggctgttgaatgattaccgtggcgttcccactcctgttctgctgctgacgttgctgttactcggcggaatgtttatggcaacgcggacggcatttggacgacgcatttatgccatcggcggcaatctggaagcagcacgtctctccgggattaacgttgaacgcaccaaacttgccgtgttcgcgattaacggattaatggtagccatcgccggattaatccttagttctcgacttggcgctggtagtccttctgcgggaaatatcgccgaactggacgcaattgcagcatgcgtgattggcggcaccagcctggctggcggtgtgggaagcgttgccggagcagtaatgggggcatttatcatggctagtctggataacggcatgagtatgatggatgtaccgaccttctggcagtatatcgttaaaggtgcgattctgttgctggcagtatggatggactccgcaaccaaacgccgttcttgattttgataaaaattttctcaaagccggttacgtattaccggttttgagtttttgcatgattcagcaggaaaagaaccatgtttactaaacgtcaccgcatcacattactgttcaatgccaataaagcctatgaccggcaggtagtagaaggcgtaggggaatatttacaggcgagtcaaagcgaatgggatattttcattgaagaagatttccgcgcccgcattgataaaatcaaggactggttaggagatggcgtcattgccgacttcgacgacaaacagatcgagcaagcgctggctgatgtcgacgtccccattgttggggttggcggcagctatcaccttgcagaaagttacccacccgttcattacattgccaccgataactatgcgctggttgaaagcgcatttttgcatttaaaagagaaaggcgttaaccgctttgctttttatggtcttccggaaagtagcggcaaacgttgggccactgagcgcgaatatgcatttcgtcagcttgtcgccgaagaaaagtatcgcggagtggtttatcaggggttagaaaccgcgccagagaactggcaacacgcgcaaaatcggctggcagactggctacaaacgctaccaccgcaaaccgggattattgccgttactgacgcccgagcgcggcatattctgcaagtatgtgaacatctacatattcccgtaccggaaaaattatgcgtgattggcatcgataacgaagaactgacccgctatctgagccgtgtcgccctttctagcgtcgctcagggcgcgcggcaaatgggctatcaggcggcaaaactgttgcatcgattattagataaagaagaaatgccgctacagcgaattttggtcccaccagttcgcgtcattgaacggcgcagtacagattatcgcagcctgaccgatcccgccgttattcaggccatgcattacattcgtaatcacgcctgtaaagggattaaagtggatcaggtactggatgcggtcgggatcagccgctccaatcttgagaagcgttttaaagaagaggtgggtgaaaccatccatgccatgattcatgccgagaagctggagaaagcgcgcagtctgctgattagtaccaccttgagcatcaatgagataagccaaatgtgcggttatccaagcctgcaatatttctactctgtttttaaaaaagcatatgacacgacgccaaaagagtatcgcgatgtaaatagcgaggtcatgttgtaacgatgatgagaattgtcggcgtcacatcaggtaacgctgcgtggttgtcggatgcggcgtgaacgccttatccgacctacccgccaggcatgataaaacgcaccaacaacgcttcaggctcgtagctcaactgcctgagacaaagtaaaaagccttatccgactgacaagtcggataaggctcaaggaaatgcaattacatatgcgccgcgattaaccgttggttatcctggtacattgcgaacaggtagttgttataactcttccctttggtgctgtagcccttcagcttgtgaatcatcgctgtggcagtcacttcctgatccgctttacgcagctgcgcacggcttttacggaagctagagtaagccgggtgcgtattcaggttagtgacataggcgctcacgctttctttgacagaactaaactgactgtaccctttcactttacctggcgcattggtacaacgtcctttcatgcatttcatgccgaacaggttgttgttgttgcgcgccagcttgctcgttccccaaccgctttctgctgcagccatcgtcgccaccatactggtggggataatgtctacgcgttcaagcaaggtattccacgggatttttcgcgtattaccggaccacttcaccttgtagcgtttggcgatgtctttcagacgcgcacgctcagcaggactccattggccctgatactgtttactaatgagccagttacgttccgcagtaatggccgcattttggctggtaatgtaaggcattacggtccggagaaacgcctttttccttggtgttccggaagggtattttcgcaaatcaggaagactactactctttgcactattgcgagaatactcttgtttactgcttacctgtttattactagctttagttaagtgggacttttgactcgctgttgttgtgtgcgtcttcgctaacacctcactgctaaacaccagagtgagtaacataagaatcatcgccccatatcgtcgtatgggagtcaaaatcatcaggtctcctggtcggatttaatcattccaacaccttatatttttcacaaatttgagagttgaatctcaaatcatatcaaaaatagctgtcaagagcaccccaaggaatagtccaaatctgaaactatgtcacgtgttaacgattcagattggcgctaaatcgcagaaaatgtgggggttatcgcaaaattcagccgttttttgcgcgagatcgctcacccttgcttctcatcctgtggacttaccgctcagggatgagttttgtttggcttatcgctggcaaactgtctgaaatcgcagcaataaggactcatccgccatgaaactcgccgcctgttttctgacactccttcctggcttcgccgttgccgccagctggacttctccggggtttcccgcctttagcgaacaggggacaggaacatttgtcagccacgcgcagttgcccaaaggtacgcgtccactaacgctaaattttgaccaacagtgctggcagcctgcggatgcgataaaactcaatcagatgctttccctgcaaccttgtagcaacacgccgcctcaatggcgattgttcagggacggcgaatatacgctgcaaatagacacccgctccggtacgccaacattgatgatttccatccagaacgccgccgaaccggtagcaagcctggtccgtgaatgcccgaaatgggatggattaccgctcacagtggatgtcagcgccactttcccggaaggagccgccgtacgggattattacagccagcaaattgcgatagtgaagaacggtcaaataatgttacaacccgctgccaccagcaacggtttactcctgctggaacgggcagaaactgacacatccgcccctttcgactggcataacgccacggtttactttgtgctgacagatcgtttcgaaaacggcgatcccagtaatgaccagagttacggacgtcataaagacggtatggcggaaattggcacttttcacggcggcgatttacgcggcctgaccaacaaactggattacctccagcagttgggcgttaatgctttatggataagcgccccatttgagcaaattcacggctgggtcggcggcggtacaaaaggcgatttcccgcattatgcctaccacggttattacacacaggactggacgaatcttgatgccaatatgggcaacgaagccgatctacggacgctggttgatagcgcacatcagcgcggtattcgtattctctttgatgtcgtgatgaaccacaccggctatgccacgctggcggatatgcaggagtatcagtttggcgcgttatatctttctggtgacgaagtgaaaaaaagcctgggtgaacgctggagcgactggaaacctgccgccgggcaaacctggcatagctttaacgattacattaatttcagcgacaaaacaggctgggataaatggtggggaaaaaactggatcagaacggatatcggcgattacgacaatcctggattcgacgatctcactatgagcctagcctttttgccggatatcaaaaccgaaagtactaccgcttctggtctgccggtgttctataaaaacaaaatggatacccacgccaaagccattgacggctatacgccgcgcgattacttaacccactggttaagtcagtgggtccgcgactatgggattgatggttttcgggtcgataccgccaaacatgttgagttgcccgcctggcagcaactgaaaaccgaagccagcgccgcgcttcgcgaatggaaaaaagctaaccccgacaaagcattagatgacaaacctttctggatgaccggtgaagcctggggccacggcgtgatgcaaagtgactactatcgccacggcttcgatgcgatgatcaatttcgattatcaggagcaggcggcgaaagcagtcgactgtctggcgcagatggatacgacctggcagcaaatggcggagaaattgcagggtttcaacgtgttgagctacctcagcagccatgatacccgcctgttccgtgaagggggcgacaaagcagcagagttattactattagcgccaggcgcggtacaaatcttttatggtgatgaatccagccgtccgttcggtcctacaggttctgatccgctgcaaggtacacgtagcgatatgaactggcaggatgttagcggtaaatctgccgccagcgtcgcgcactggcagaaaatcagccagttccgcgcccgccatcccgcaattggcgcgggcaaacaaacgacacttttgctgaagcagggctacggctttgttcgtgagcatggcgacgataaagtgctggtcgtctgggcagggcaacagtaacttttccggcttcccgttcgtcagtacctcgggaagccgccaaccaggataaaatgtcagccctaatcagcgttgcaggataaagcaccgctcactcttcaacagaccgatttgcaccccagcaaatgtagcgttattgttaccttccttgctacagagttcgacagatatcccgctatgacattctccctttttggtgacaaatttacccgccactccggcattacgctgttgatggaagatctgaacgacggtttacgcacgcctggcgcgattatgctcggcggcggtaatccggcgcagatcccggaaatgcaggactacttccagacgctactgaccgacatgctggaaagtggcaaagcgactgatgcactgtgtaactacgacggtccacaggggaaaacggagctactcacactgcttgccggaatgctgcgcgagaagttgggttgggatatcgaaccacagaatattgcactaacaaacggcagccagagcgcgtttttctacttatttaacctgtttgccggacgccgtgccgatggtcgggtcaaaaaagtgctgttcccgcttgcaccggaatacattggctatgctgacgccggactggaagaagatctgtttgtctctgcgcgtccgaatattgaactgctgccggaaggccagtttaaataccacgtcgattttgagcatctgcatattggcgaagaaaccgggatgatttgcgtctcccggccgacgaatccaacaggcaatgtgattactgacgaagagttgctgaagcttgacgcgctggcgaatcaacacggcattccgctggtgattgataacgcttatggcgtcccgttcccgggtatcatcttcagtgaagcgcgcccgctatggaatccgaatatcgtgctgtgcatgagtctttccaagctgggtctacctggctcccgctgcggcattatcatcgccaatgaaaaaatcatcaccgccatcaccaatatgaacggcattatcagcctggcacctggcggtattggtccggcgatgatgtgtgaaatgattaagcgtaacgatctgctgcgcctgtctgaaacagtcatcaaaccgttttactaccagcgtgttcaggaaactatcgccatcattcgccgctatttaccggaaaatcgctgcctgattcataaaccggaaggagccattttcctctggctatggtttaaggatttgcccattacgaccaagcagctctatcagcgcctgaaagcacgcggcgtgctgatggtgccggggcacaacttcttcccagggctggataaaccgtggccgcatacgcatcaatgtatgcgcatgaactacgtaccagagccggagaaaattgaggcgggggtgaagattctggcggaagagatagaaagagcctgggctgaaagtcactaaaaattgcctgatgcgctacgcttatcaggcctacatgatttctgcaatatattgaatttggaagaatttgtaggccggataaggcgtttacgccgcatctggcataaacaaagcgcactgttccggcgttgagaaacgccggaaaacgtttcaaacaggctgctgccgtagccgatgccgctgcactttctcgacatccatgcactgcaacgcctttgtcgggcaggcttcaacacaggccggtcccgtctcccgatgccagcacagatcgcacttaatcgccctcgcctttttgcggctagaaacgacctccatcgcaccaaacgggcaagccagcatacagcttttacagccaatgcaacgtgtttgttcaacgaaaatatgcccatgttcgcggcttatcgcgtcaacagggcagacattcgcgcacggtgcatcttcacactgatgacaggctactgccgtggtccagcagtggtctttaatgacacgaatacgggaaataaactcgtctggactcaacgcagcgcaatcctgattctcatgatggctcactgcgcaagccacttcacaggtacggcaaccgatacatttcgtcgcatccgcaataataaaccggttcatgatcactcctttgcactaaaacagcagagtgccagagagcgcgtccctactgctttgatccaacgaaggaaatgttaaagttttggcacttgtccaaagcgttatgtgatcgcgcccaggtcatccctgacagtaaatcccagttcattagaaatagcctgcgcggtttcacgcagtggtttcaggagatttttctctcccacctgtttcagacgacttgtgctaaggctaatgctcacggcgtacggcacccgcccatgaatatcaaacaccggaacagcaatacaggagacgccgagttcgttttcttctctgtccatcgccgctccgctttcacgaatgtgcgccagttcgtcgaacatcgcgggcagctcggtaatggtattgcgggttaacggctggatctcatgctgatggctttcccagtaactcttcacgtagtccgggtgaccaaacgccatgtagatcttgcccattgcggaacagtagagcggcatatgctggccaatataggcacgggttcgcagcatcccggttgtgggttccagcttataaatcaaaatagcgtgatcgtcttcgcggctggagaagttaatggtttcaccagtggcgatgttcagtgcctcaagatgcggagcggcgatatgaatgatattcaggctagacagcgccttctgcccgacggcaataaatttggtggtcaggcgataactccctgcggcaggcgcggtggtcacatagccgcaggactgtaatccctgcaataagcgatggacggtactcttatttaaaccagccagctcgctaagatgcgccaacggacaaccgtttggatagttgctcaaaatctcaatcagcatcaacccgcgaaacagactctggcttccggctggacgctctttttcctgcgccatctcgttctctttttttcccatcacttctttccccattttgtcgcgtcctgatggtagcgcaaagtgtgccgtagttcacgatctcgacagataatttataaccaattgatttttatgtcttttgaaattcatcaatcagattgccttgttaaaaagtgatcgatatatttgaaatcaagtttcgcatattgaaattttaagccaaaaaagcgatcaaaaaaacaaggaagcctgggatgaaagtgacatttgagcagttaaaagcagcctttaatcgggtcttaattagtcgcggcgttgacagcgaaacggctgacgcctgtgcagagatgttcgcccgcaccaccgaatccggcgtttattctcacggcgttaatcgtttccctcgtttcattcaacaactggaaaacggcgatatcattcctgatgcccaacccaaacgtataaccagcctcggcgcaattgaacagtgggacgcccagcgtagcatcggtaacctgacagcgaaaaagatgatggatcgcgccattgaactggctgccgatcacggtattggtctggtggcactacgtaatgccaaccactggatgcgcggcggcagctacggctggcaggcggcggaaaaaggctatattggcatttgctggaccaactccatcgccgtaatgccgccgtggggcgcaaaagagtgtcgcataggcactaacccgctgatcgtcgccattccttccacgccgatcaccatggtcgatatgagcatgagcatgttctcttacggcatgttagaagttaaccgtctggcaggtcgtcagctcccggtcgatggtggctttgatgatgagggcaatttgaccaaagaacctggcgttatcgagaagaatcgccgcattttgccgatgggctactggaaaggttctggcatgagcattgtgctggatatgatcgctactctcctttccgacggcgcatccgttgccgaagtcacccaggacaacagcgacgaatacggcattagtcaaatttttattgccattgaagtggacaagcttatcgacggtcccacccgcgatgccaagctgcaacgcatcatggattacgttactagtgccgagcgtgctgacgaaaatcaggccattcgcttacccggccatgaatttactaccctgctggccgaaaaccgccgtaacggcatcactgttgatgacagcgtgtgggccaaaatccaggcgttatgaggagataagtcatgatttttggacatatcgcgcagcccaatccgtgccgtttgcccgccgccattgaaaaggcgctcgattttctgcgcgctaccgatttcaacgccctggagccgggcgttgtcgaaatcgacggcaaaaatatttatacgcaaattatcgatttaaccacacgcgaagcggtggtaaaccgtccggaagtgcatcgtcggtatatcgatattcagtttctggcgtggggcgaagagaaaatcggcattgctattgatacgggaaataataaagtcagcgaaagtctattagagcagcgcaatattattttttatcacgacagtgaacatgaaagttttatagaaatgataccgggcagctacgcaattttctttccgcaggatgttcaccgaccaggttgtattatgcaaacagcctctgagatacgaaaaattgtggttaaagtcgcattaacggcgctgaattaatcgaataatcgtctacgccagaacgcctgggtaatgttattgctctaactatattaataattcaggttgctgcacatgcgacttgaattatgacagacatagcctcaaggaatagctatgaaaaaaatactcgaagcaatactggcgattaatctcgccgtactttcctgtattgtatttataaacattattttaagatatggttttcagacaagcattttatctgttgatgaattgagtcgttatttatttgtctggttaacgtttattggcgcgattgtagcttttatggataacgcccacgttcaggtcacctttctggtggagaaactctcccccgcatggcagcgacgagtcgctctggttacccattccttaatcttatttatttgtggcgcactggcctggggcgcaacgctaaaaacaattcaggactggagcgattatagtccgatcctcggtttacccatcggcctgatgtatgccgcttgtctgcccaccagcctcgttatcgcattctttgaactgcgtcatttatatcaactcatcacgcgtagcaattctctaacgagcccaccgcaaggagcttaatcatggctgtgctgatttttctgggctgtctgttgggtggtattgctatcggtttgcctattgcctgggcactgttgttgtgcggggcggcgttaatgttctggctggacatgtttgatgtccagatcatggcacaaacgctggtgaacggagccgatagcttctccctgctggcgattccgttctttgtgctggcgggtgaaatcatgaatgcgggcggcttgagtaaacgcattgttgacctgccgatgaaactggtggggcataaaccaggcgggctgggctacgtcggcgtgctggcagctatgattatggcgagcctttctggttctgccgttgcggataccgccgccgttgccgctctactggtgccgatgatgcgcagcgccaactatccggtcaaccgggcggcggggctgattgcctctggcggcattatcgcgccaattattcccccttccattccgtttattatcttcggcgtttccagcggattatccatcagtaagctgtttatggcgggcattgcccctggcatgatgatgggcgcaacgctgatgcttacctggtggtggcaggccagtcgccttaatttaccccgccagcaaaaagcaacgatgcaggaaatctggcactcttttgtctccggtatctgggcgctgtttcttccagtcatcattattggcgggtttcgctccggcctgtttacccctaccgaagccggggccgttgctgctttctatgcgctgtttgtcgccacagttatttaccgtgaaatgaccttcgccacactttggcatgtactcattggcgcggcgaaaaccaccagtgtggttatgtttctggtggccagcgcacaagtttccgcctggctgattaccattgctgaactgccgatgatggtttctgatttactgcaaccgttggtcgatagtccgcgtctgctgtttatcgtcattatggtggctatcctgattgtcggcatggtcatggatttaacgccgacggtattaattcttaccccggtattaatgcctttagttaaagaggcaggaatcgatccgatttatttcggtgtcatgtttatcattaactgcagtatcggcttaattacaccgcctatcggtaatgtacttaacgttattagtggggtggcaaaactcaaattcgatgatgcagtcagaggcgttttcccttacgtcctggttttatatagtttattagtcgtatttgtttttattcccgatctcatcatcctccctttgaaatggattaattaaaaggaaaatattatgaaattacgctctgtaacctacgcattattcattgctggcctggctgcattcagcacatcttctctggcggcacaatctttacgtttcggttatgaaacaagtcaaaccgacagccaacatattgcggcgaaaaaattcaatgatttattgcaggagagaaccaaaggcgagctgaaattaaaactgttcccggacagcactctcggtaacgcgcaggcgatgatcagcggcgtacgtggcggcaccatcgatatggaaatgtccggcagcaataactttgccgggttaagtccagtgatgaacttgcttgatgtccctttcctgttccgcgataccgctcacgcgcataaaacgctcgacggcaaagtcggtgatgatctgaaagccagtcttgaaggtaaaggactgaaagtactggcctactgggaaaacggctggcgcgatgtcaccaacagccgcgcaccggttaaaacccccgccgacctgaaagggctgaaaatccgcaccaacaatagcccgatgaatatcgccgcattcaaagtctttggcgctaacccgatcccgatgccgtttgccgaagtctataccgggctggaaacccgcactatcgacgctcaggaacacccgatcaacgtcgtctggagtgcaaaatttttcgaagtgcagaagttcctttctctgacgcaccacgcctattccccgcttctggtggtgatcaacaaagcgaagtttgatggcttaagtccggagttccagcaggcgctagttagttctgcacaagaagcgggtaactatcagcgcaaactggttgctgaagatcagcaaaaaatcatcgacggcatgaaagaagcgggcgtggaagtcatcaccgatctcgaccgcaaagcctttagcgacgcactggggaatcaggttcgcgacatgtttgttaaagatgtgccgcagggagctgatctgctgaaagccgtggatgaggtgcaataaaccatgacgcaatactggctggggttagattgtggcggtagctggctgaaagccgggctgtatgaccgcgaaggccgggaggcaggcgtgcagcgcctgccgctgtgcgcattaagcccgcagccaggctgggcagagcgcgatatggcagaactgtggcaatgctgcatggctgtcattcgcgccctgcttactcattctggtgttagcggggaacaaattgtcggtatcggcatctccgcacagggaaagggcttgtttttgctggataaaaacgacaaaccgctcgggaatgctattttgtccagcgaccgccgggcgatggaaatcgttcgtcgctggcaggaagatggcatcccggaaaaactctacccgctgacccgacaaaccttgtggaccgggcatccggtgagcctgttacgctggctgaaagagcacgaaccagaacgctacgcgcaaattggctgcgtgatgatgacgcacgactacctgcgctggtgtttaactggcgtcaaaggctgtgaagagagcaatatttccgagtccaacctctacaacatgagtcttggggaatatgacccgtgcctcaccgactggctggggatcgctgaaatcaatcacgccctgccgcctgttgtcggatctgccgaaatctgcggggagatcaccgctcagacagccgccctgaccggtctgaaagcgggtacgcccgttgttggcggcctgtttgatgtggtttccaccgcactctgcgccgggatcgaagacgaatttaccctcaatgcggtgatggggacctgggcggtgaccagcggcataacccgcggtttacgtgacggtgaagcgcatccgtatgtctatggtcgctacgttaacgatggtgaatttatcgttcacgaagccagccctacctcttccggcaacctcgaatggtttaccgcacagtggggagaaatcagctttgatgagatcaatcaggccgttgccagcttgccgaaggctgggggcgatctctttttcctgccgttcctgtacggcagcaacgccggactcgagatgaccagtggtttctacgggatgcaggccattcacacccgcgcgcacctgttgcaggccatctatgaaggggtggtgttcagccatatgacccacctcaaccgaatgcgcgaacgttttactgatgttcacaccctacgcgtcactggcggcccggcgcactccgatgtctggatgcaaatgctggcggacgtcagcggtctgcgtatcgagctgccgcaggtggaagaaaccggctgctttggtgcggcccttgccgcccgcgtcggcaccggggtttatcacaacttcagcgaagcccaacgtgacttgcgacacccggtgcgcaccctgctgccagatatgaccgcccatcagctttaccaaaaaaaatatcaacgttatcagcatctcattgccgcacttcagggctttcacgcccgcattaaggagcacacattatgagccgaccacttctgcaactggccctcgaccacagtagtcttgaagccgcgcagcgcgacgtgacgctgttaaaagacagcgtcgatatcgtcgaagcgggcaccattctctgtttaaacgaagggcttggcgcggtgaaagccttgcgcgaacagtgcccggacaaaatcatcgttgctgactggaaggtcgccgacgctggtgaaacgctcgcgcaacaggcgtttggcgcaggcgctaactggatgaccatcatctgcgccgcgccgctcgcgacggtagaaaaaggccacgcaatggcacaacgctgcgggggtgaaattcagatagagctgttcggtaactggacgctggacgacgcccgcgactggcatcgtattggcgtgcggcaggccatttatcatcgcggtcgtgatgcacaggccagcgggcaacagtggggcgaagccgatctggcacgcatgaaggcgcttagtgatatcggccttgagctttccattactggcgggattacccctgctgacctgccgctgtttaaagatatccgcgtgaaagcgtttattgccgggcgggcactggcaggcgcggcaaatccggcgcaagtggctggcgatttccatgcgcaaatcgacgctatctggggaggtgcgcgtgcgtaatcatcagttagggatttatgaaaaagcgctggcgaaagatctctcctggccggagcggctggtgctggcaaaaagctgcggttttgattttgtcgaaatgagcgtggatgaaaccgacgaacggctcagtcgtcttgactggagcgccgcacaaaggactagcctggttgccgcgatgatcgaaacaggtgttgggatcccgagcatgtgcctgtccgcacatcgtcgctttccctttggtagccgtgacgaggcagtgcgcgaacgggcgcgggaaatcatgagtaaagcgattcgcctggcgcgcgatctcggcattcgcaccatccagctggcaggttatgacgtctattacgaagaccacgacgaaggcacccggcaacgttttgctgaagggctggcgtgggcagtcgaacaggcggcggcaagtcaagtaatgctggcggtggagattatggataccgcgtttatgaactccatcagcaaatggaaaaaatgggacgagatgctcgccagtccgtggttcaccgtctacccggacgtcggcaacctcagcgcctggggcaatgatgttcccgccgaactgaaactgggcattgaccgtatcgccgcgatccacctgaaagacacccagccagtcaccgggcaaagtcccggacagttccgcgacgtgccgtttggcgaaggctgcgtcgatttcgttggcatcttcaaaacgctgcataaactgaactatcgcggttctttcctgattgagatgtggaccgaaaaagccaaagagccggtgctggagattattcaggcgcggcgttggattgaagcgcgtatgcaggaggctggatttatatgttaacgtaaatgcaggaggctggatttatatgttagagcaactgaaagccgacgtgctggcggcgaatctggcgcttcccgctcaccatctggtgacgttcacctggggcaatgtcagcgcggtagacgaaacgcggcaatggatggtaatcaaaccttccggcgtcgagtacgacgtgatgaccgccgacgatatggtggtggttgagatagccagcggtaaggtggtggaaggcagcaaaaaaccctcttccgatacaccaacgcatctggcgctctaccgtcgctatgccgaaattggcggtattgtgcatacccacagccgccacgccaccatctggagtcaggccgggctggatctccccgcctggggcaccacccacgccgattatttttacggtgccatcccctgcacgcgacagatgaccgcagaggagattaacggcgaatatgaatatcagaccggcgaagtgatcattgaaaccttcgaagaacgtggcaggagtccggcacaaatcccggcggtgctggtgcattctcacggcccgttcgcatggggtaaaaacgccgccgatgccgtgcataacgccgtagtactcgaagaatgcgcctatatgggtctattcagccgccagcttgcgccgcagctccctgcgatgcaaaacgaactgctggataagcactacctgcgtaagcatggggccaatgcctattacgggcagtaatccctcacgccggggcttcatcgccccggcactacgaattgatatgttccttgctgtaacgccgcttccacgctgctggcgttaaaccagtatgtttctgaaaaatctgccggaaatagccaacgtcattaaaccgtattgcatggagcaggccgacaacgtcgagtcactgcataacctgttgctgcccgccgatgcgccatttacgacatttgaaggcaagggattgttcagccataagatcctgattcagacgccaggttcccggtatgaacagagcaatccagagcaacaacctttgtggcattacgacggagcaccagccgcaccgacatccaccggtgaattaaaaacgccagctcaccccggtgacaaaggtaaaactctcattacgatcaatcatcgggctgtcggtaatctcttccggcagctcgctgtatcctgcgctcgccatcaatacgacgtgctctcctatcgggtattttgccgtcaggctgacatagggcacccaggcatcctgcgcggaataacttgccagaccgctacgacgggactcactctcactaatgccatagtaatagtcactgaaattctcgtcataatagagaacgcccagcgcaggtgtcaggctcagacgacctatctgcattttgtggaatacgcttagctcccccacccagccgttgctgttatccagaacgtccgcagctgcagaggctttcacggttccccaacgctcgtggtgataccaggcaacccccgccatagccgtactatcacgcttatcaagctgttgcatggcataatcgtcattatcggtagggtcaaattccagcggcatccaggatgcggtcaggctaagttcatttttttcactttggctcagaataaaacctaacgtggtctgacgaacataaaaagtatcaccttcataactaatcagcggaattgccttcgtattttcattataaccgcgataagggctttcattataagccgcaccagcaccaatggataattcagaagcagttgcgcttgccataaaaggcaacgcaaataacgccacaatattgcgattaattaacatgtccggtattccattttaaaataagataaaaaagagtcggcataataatgcttacaatttctccggtgcaagattcatatttatatagtaatatataaaattatatataattgggctgttgcgatgacaaaattacaacttaagtaccgggagttaaaaattatcagcgtaatcgctgccagtgaaaatatcagccatgccgcgactgtacttggcatcgcacaggccaacgtcagcaaatatcttgctgattttgaaagtaaagtgggtttaaaagtctttgaccgaaccacccggcagctgatgctcacaccttttggcaccgcgctgttaccgtacatcaacgacatgctggacagaaacgagcaacttaataattttattgcagattataagcatgagaaacgtggtcgggtcaccatctacgccccaaccggcataattacctatttatccaaacatgtaatcgataaaattaaagatatcggtgatatcaccttaagcctaaaaacctgcaatcttgagcgtaatgccttttatgaaggcgtcgaatttcctgatgattgtgatgttttaatcagctacgctccaccaaaagatgaaagcctggttgccagttttattacccaatatgccgtaaccgcttatgccagccagcgctatcttgagaaacatcccattagccgtcctgacgaactcgaacatcactcctgtattttgatcgacagcatgatgatcgacgacgcgaatatctggcgcttcaacgtcgccgggagtaaagaggtgcgggattatcgcgtgaagggaaattacgtttgcgacaacacgcaatctgcgctggagctggcacgaaatcacctggggattgtgtttgcgccagacaaaagtgtgcagagcgacctgcaagacggcacgctggtgccctgctttcagcaaccctatgaatggtggctggatctggtggctatcttccgtaaacgggaataccagccctggcgggtccagtatgtgctggatgaaatgctgcgtgaaattcgccaccagcttgctcagagccagcaactgcggcctgaacaagcggcggaaagcgaagattaatgatcgagataaaggtaatgcacccagctggtcatgcgtaatagcactttgcgcatcacgctgacatggctgaaatgatcagagtaaaccgccacctgggcgtaaataccgtctggtaaagcgctcaaatcagtgtgctcatccagttcaatggtcgcgataacgccatcactacccggcgctgtgtttaacgtctgtaaggtgccggtgctctgataagctccgccgggaacggctggactaatggctgccagcttaccgctgaataccttacctggcagagcattaaacaccacttccgcatcgtcgccaggagccagtcgcagcaaggagttctgacggaactgcgccacgatttgtcgtttctgatcgggtataaacaccatcaccggacgtagcggcaggctcgcggcataggtacccggacgaatcagtacctgggtcacataaccatcgctcggcgcacgcactatcgtctgctcaaggttatattttgcttccgcgagctgtgctttcaggctggcgatttgagaatgttcacccaacaccaggctatccagctggctctggatctgtttttgttccgccgcgctactcttcacggaggcttcctgcgccagataattttgccgcgccacatcgatatcgcgttcactaaacgggtttactttcgcctggctgccacgtgcgtaacgctgatactctttagcgaatttatcccgcgtggcctttgcctgctgagtattcgccgccatctcatctaactctgcgcccaacgcccgctgtttatgttctgcggtaacgatatccgccatcagccgatccacccgcgcctgataacgcgtcgggtccagtcgaaatagcacctcaccttttttaatcagcgtatttttcttatccgtcacttcaatcaccacaccagtcacctgtgggacaacaggaatagaaataaccgctttttgcgctttaaaggtatacggatggttatagttcattaacagaattagaccgctgacaataaatattccacccagggccgctgtgggaatggtccatttatttacgggaattttgaagatcttaaacattgcccatgcaaaagccacataggtcaaaataatcagtaaatccataagtattactcggcagaagaggatttgatgtcggcgagctgtttctccagcccggcaatgcgctgttgcagttgcataacggaactatcatggctttgcattccccatccccgctccgggcggtaaagcgtggcccaaatccacaaaaacggccagataacatgtaacgtaaaaagactcacccaaccagcaacatgaatggcgtcggcatgaggatgattacgttttttggcaatcaggtagggaatatcatgtaaaataatgatcccatagaagatcaccagaaatacaaaaataagcactcccagtgcaaaatagtccaggaacatatttccctcaaagaatataaaaaagaacaattaacgcatattatgaaatgccatgatgcagtgcaatttccttatttatataacgacatattgttttttatatactttcttaaatgtgctgtctggtttttcaacaggacgaggtttatcatattgaaatagtggaactattggccaaactaatgaataactccagtaaaacatccacagtacagattaagcgtattaaaccttcaattatctaccgtttattgctgattggcctcggatcaccaatggtgatttacggcctggttcgcccgctcaccatcgaaacgcgagattaaactcctgacaaaacacgccccagaaacgtacttctgttggcgtagtctgggttattgcgcacgtaggtttaaaacgtaaattgtaacaacgtgcgctttgtttatgccggatgcggcgtgtacgccttatccggcctacggtcaggttcccgtaggcatgataagacgcgtaagcgtcgcatcaggcaatgaatacccaatgcgaccagcttcttatatcagaacagccccaacggtttatcgctgtagctcaccagcaggcacttggtttgctggtaatgctccagcatcatcttgtgggtttcgcgaccgataccactttgtttgtagccaccaaacgccgcatgtgccgggtaagcgtgataacagttggtccacacgcgcccagcctgtatgccgcgccccatcttataggccagattaccgttgcggctccagacgcccgcgcccaggccatattgcgtatcgttcgccagctccagcgcttcttccatcgttttgaaggtggtcaccgccagcaccgggccaaaaatctcctcctggaacacccgcatattgttctgaccaaacagaatcgtcggttcgaggtagtagccgtctttcagttcaccttccagcagcttgcgccgcccgcctgtgagcacgtcagcgccctcttttttaccgatatcaatgtagttgaggatggtttccagttgcccgtgagaaacctgcgcgcccatttgcgtcacgctgtcgagcgggttaccgctacgaatgctttcgacacggcggatggcgcgttccataaagcgttcgtagatagattcctgcactaaagcacgactcggacaggtgcaaacttcgccctggttaaaggcaaacagtgcaaagccttccagcgctttatcgaaaaaggcatcttcttcatccatcacatcagcaaagaagatatttgggctcttaccgcccaactccagcgtcaccggaataatgttttgcgttgcgtattgcataatttgttggcccacttccgtactgccggtaaacgccactttggcgatgcgtttgctggtcgccagatattcgccaattaccccacctgcgccattgaccacgttcaccacgcccggcggcagtaaatcaccgacaatttccattagcagcagtacagaaagcggggtaagacgtgcgggtttcagcaccacacagttgcccgccgccagcgcgggagccattttccagctcgccatcagcagcgggaagttccacgggataatctgccccaccacgcctaacggttcatggaaatgataggccacggtttcgctatcaacttcactgatcccaccttcctgcgcccgaatacagctggcgaaatagcggaaatggtcaatcgccagcggtacatccgcagcactggtttcgcgaatgggtttgccgttatcccaggtttcagctgtcgctaacagctcgaggttttgttccattcgatcggcaatcttaaacagaatcgccgcacgatcctgcacgctggtgtgcgcccatttatctttcactttgtgcgcagcatccagcgccagatcgatgtctcgtttgccgctagacgccacttcgcacagcagctgcccggtcaccggcgtcagattctggtaatactcgccgtcggcaggggctacccattcgccgccaataaagttgtcatagcgggcttttaacttgagggggaaaccatactcgccgggcttaatctgtgcactagggggattattggtcatgatcgtctccttgcggtgtgaggtataacaagggtagacgtgactggcgaaatcttcgccagtcggtaacagctttacgacagctatcacgaatttacgggcaagggttacagagatagttgaaaaagcggctaacaatttgccagccgttgtggaaatgatgattacatcgctgcgcgataaatcgccacaatttcttcgtgagttgcctggatcgggttagtaaagccacaggcatctttcagggcattagtcgccaataccgcgaaatcttcttctttcacgttcaggtcgcgtaggcctgccgggatatccactttcttcgccagttcacggatggcgttaatgcaggcttcagcaccttccgcgtcgtttttacctgtcacgttcacgcccattgcagcggcacagtcacgcagacgtgcagcggcgactttgctgttgaatacctgaacgtgcggcagcaaaacggcgttacatacaccgtgtggcaggttgtagaaaccgcccagctggtgcgccatcgcatgaacataacccagagaagcattattgaacgccataccggcgaggaactgggcataagccattgcttcacgcgctttcgcattactgccatcttcaacggctaacggcaggttttcggcaatcatggtcacggctttcagtgcacaagcgtcagtgatcggcgtggcggcaatagaaacatatgcttcgatagcgtgcgttaaggcatccatacccgttgcggcggtcagactcttcggcataccaatcatcagagaggagtcattgacagaaagcagcggagtgacatgtttatcaacaatcgccattttgatatgacgcgcttcgtcagtgatgatgcagaaacgggtcatttcagaggccgtacccgccgtggtattgatggcgatcatcggcagctgcggttttgcagagcggtcaacgccttcgtaatcgcgaatatcgccgccattggctgccaccagcgcaataccttttgcgcagtcgtgtggagaaccaccgcctaaggagatcacgctatcgcaattattctctttaagtaatttcaaacctgcggcgacgttttccgtggtggggttaggttgggtgccatcataaataacgctaaaaatattgcgttcttccagtgctttttgcacatcgcccgccatacctaatttcgttaacatattgtcagtgacaattaaggtacgggtaaatccataatctgccatcatattcattgcatcagtcaaactatcagcgccgatgacattcacagaaggaataaagaacgtactagctgccataacacactcctgaaagtgtaaaaaagggcgggcagcttactgaggattttcattcgaaaatatgatcagtattattgattatcaaaattaatctaataaaaagcacattgtattcattaaacaatgtgctttttttaaattcataagaattttgtattaatttattttaaaacttaattaatcatttccttatttttccggaaataataatgcgtcgcgcaataaatgatcatttccacgacgacgcgtaaagccaatgcggtcaaaatattccagaatctgaattgccagctttcggcctacgcctaagcgatcgcggaaatccgccgcgcaggtactaccacactcctgatcgagatcgcggatcatattggcaaactcgacaatccgatcgttacggtaataacgatctttaacgatcgcggtaattattccttgctgcgccgcctggcgtagagtcaggcgcattgcctgctcgtcggttcccgtctcttttgccaggtcacgcacccaccacggttcgtcaccaaacagtggctctgctttttgccagatggcctgctgctcttcgctgaagcccgctttgtgatctggcagatgcagccagccgtgatggctgtggatgtcgccgctttcgcgcatcttttcaatcagcaacagtaccagcgcttcatcttccattggcaacgccatacgtcgcagacgttcgcgcccagggccaggttcatcgcgatgttgctcatgataagtcgctaatgtgtcgagaattttccgctgccagcgggcggcaaccggcgcattcaacaagctataaccagcctgaatataaccaggctgttgcagcaattcgcgcatcccttcgccgttgagctggcgcgcccaggcgaaatccgcaaggttaaccgcgccgcgttccagatgaacagataacgcatcggcatcgctctgcgcccgtgcaagagacgccagccattgcagatattccggcttacgtttaccgcgacgcggcgggttaagcatcacgacgcgcgctccggccagcgtgttgcgggcagagatatcgcgcaataccaggcggtcgttatctgccagccataacggggtgtcgaagaccagttcagcaaggttatcttccagcagactaacgcgtcccgtgacgtggctggcggcgtggtgaatatgcagcggctgccactgggtcagcggtgtatgggtttgaagctcgacaatcacccgtgtgaacggctctggcggcacatcggcaagcagccagtcgccacggttaatctgctctttttccgcatcacccgcgatgttaagcgcgatacgctgcccggcattggcggtttctgttggctggttttgcgcatgcagcgcacgtacacgcatcggtttatttacaccagtcagccagagactatcgcctaccttcacttccccgcttaacgccgtaccggtgacgaccagcccggcaccttttacggtaaatgcgcggtcaatcgcgaggcggaaactatgttggctggcgtgctcgcgttccggcaactgaagcagatgctcgcgcagggcatccattccccgaccttcggttgctgcggtgataaacagttttgcctcagcaaaaccgtattcccgcagaacctcctttacctggcgttcaacctcatcaacacgcgcttcgtccacgcgatcggctttggtcagcgccactgtcagcatcgggttaccggtcagctgcaaaatcgccagatgctcacgggtctgtgccatcacgccgtcatcgcacgccaccaccaacagcgcgtgatcgataccaccaacgcccgccagcatgttggaaagaaacttttcatgaccgggaacgtcgataaaaccaggcacgcgaccatccggctgcggccagtaggcatagccgagatcgatggtcatgccgcgctttttttcttccggcagacggtcagcatttacgccagtaatcgcctgcaataaggttgttttgccgtggtcaacgtgtccggcagtcgcaataatcatttcaacaacatctccaaaaaccgttgctcatcttcaaggcagcgtaaatccagccacaatcgtccgtcataaatacgaccaatcaccggcactggcaattcacgccagcgggcggctaaactctcaaggtggctaccgcgtccatcatggggtgtaaacgttaatgccgcgctcggcaggcgatcaaccggcaggctaccactgccaatctggctaagacatggcataacctgtaccgcaaactccgcgccgtaatgtgcggcaaggggggcctgtaaacgttgtgcctggatttgaatgacctctgcgctgcgggtaagcaggcgcagggtcggtaatttttcactcagagcttcagggtgtaaataaagacgcaacgtggcttccagcgccgcgagggtcattttatccgcgcgtaatgcacgcttcagcgggtggctttgcaggcgggcgatcatctcttttttaccaacaataattcctgcctgcggcccgcctaacaacttgtcgccggagaaactcaccagactgacgcccgccgcaatcaactcctgcggcattggctctttcggcaaaccgtactggctaagatcgaccaggctgccactgcctaaatcagtcactacgggaacatccagctctttgccgagcgccaccagttccgcttcatctatcgctttggtgaacccctgaatgctgtagttactggtatgtactttcatcaacagtgcggtattttcattcaccgcctgacgataatcattcgcgtgcgtgcggttggtggtccctacttcgtgtagggtgcagcctgcctgacgcataacatcgggaatacgaaacgcgccgccaatctccaccagttcgccgcgagataccaccacctcttttccgctggcagtggccgccaacatcaataacaccgccgccgcattgttattgacgatacaggcatcttccgcccccgtaatacggcacagcagctgcgccagcgcccgatcgcgatgtccgcgtccggcgtcgtccagatcatactcgagggtcactgggctacgcatagcctgcgcaacggcttccaccgcggcttccgcctgtaaagctcgcccaaggttggtatgcagcacggttcccgtcaggttgatcaccggacgcagcgcgctctgcgcttctttcgtcaaccgggcatcgacttcttgcgcccagttttcacaccacgcaggcagcgtctggctgccacgaatcacttctcgcgcttcgtcgagcatctgacgcaacaattccaccacgcgggtgtgaccataagtatcacgcaaagaaaggaaggagctatcgcgcaataagcgatcaatagccggaagttgactatagagggaacgcgtttcggttgtcataggaaacctggctgatcaaggccctctcacacggagaagggcgtttaacataaccacggattgtaacgtgagatgggtcaggaggacatatcgcgcatcaagcctttggcggttcggtgcgagcaaaactttcgcggctaaacaggttttcgaccagtttgactaagtgtgggcggtcgacacaccaacctggcgcaacgcggcggaaattgagatatccgacggcacaggcaatggcgatagtcgccagattgaccgtatcggttttgagtgtgccatcgaccagatatccttccagcacatccagactgcggttgattttctcccgctggcgtaacaattcatcttcagactgctgcgccgctggacgcgcctgttcacgcacgcttaccagcccggcatccataatgccatccgccagtgcctcaattttgcgcacccgcaagctctccagcggatcgcgcggcaacatcgccggagcgacattcattaattcaatatattcagcgatgatcgggctatcaaaccagcattcgccctcttcggtcaccagcaccggcacttttcctaacgggttaaattgcgccacgccgttgtccgcgttatagggcagttcattaataaattcgaaagttatgcccttttctaacaacagaatagaaagtttgcgtacaaacgggctggtgtagctaccgacgagtttcatgccgagtcctttgtgcgaggaaaaatatcagtatggctcaatgatccaaataaagataatgcatccagctggtcattcttagcagcactttccgcatcacgctaacatggctgaaatggtcggagtaaaccgccacctgggcgtagatgccgtcgggtaaggcatcgatatcatcgttagggtccagttcaatggttcccagcacaccgtccgtgccgggcacgaccgttaaactttgcaataccccctgcgcctgataagaaccgcctggcacgacaggtaaaatactagtcagtttgccgtgaaacacctgcccaggtagcgcgttaaacaccacttccgcatcatcgccaggtttcagacgtaacaggctgttttgccgaaattgggcgacaatttgccgtttttgctcggggatgaagaccatcaccggacgcagcggcaaggcagctgcgtatgtacctgggcggatcagtacctgagtaacgtagccattgctcggcgcgcgaatgacagtctgctcaaggttatattttgcttcagtaagttgcgctcttaagctcacaatctggctttgctcgccgttaaccatactgtcgagctggctctggatctgcgcctgctccgccacgctgcctttcaccagcgcatcctgcgcgaggaaattttgccgcgcatcgtcgatgtcacgttcgctgaacggattcaccgccgcctggctgcctttcaagtaacgttgataatttttaaacagacggtcgcgctccgcactaacctgggtggtgttggcctgcgcttcagtgagctgcgcacgcagcgtctttatattatgcgtcgccgtcatcaggtcagcctgaagtctgtcaactcgcgcctggtaacgaaccgggtcgagcttaaaaagcacctcgcccttttgaataagctgattattcttgtcagtgacttcagtaacaattcccgtcacctgtggcgtgatagggatcgctatcactgccttttgcgcggtaaaagtgtaagggtggttgtagttcatcaacaaaatcaaaccactcaccagaaacacgcctcccagcgccgccgtcgccagcgtccactgatttaccggaatgcggaagattttaaagaccgcccacgccagcgccacgtaagttaaaacaatcaatagatccataattagatctccgggaacgtggaatagtcagtctttttctcggcggcgagttgatgctccaaccgggaaattcggtcagaaagtgcggcgatttccgggtcagtcgctttctcctggctcgcaacatgactctgcataccccagccacgctccggttgatagagcgtcgcccagatccacagaaacggccagataacatgcagagtaaacaggctcacccagcccgccgtatgaatagcgtcggcatggggatggttgcgctttttggcaatcagataagggatgtcatgtatcgcgatgattccataaaaaatcaccagaaagacgaagatcagcactcccaacgcgaaatagtttagaaacatatctgcctcggattcacgtttatcagtgttgtttttgggctggcagccagaagggagtcaggctgatattttgacaataatccgggttcgcgattctcgccataacaccaaagaataatttttagaggtgatgagttgcttagttacataacgattgtatgacgaaggcataacatgctgtagatcacatcaggtgaacgccgtaagaaaatatcttgtgattcagatcacaaagattcaacaaaccatcaaaacaaaaatgtgacactactcacatttaaatgccatttttagcgaaaatcgccgccttgttgcttttttacacaagcgttttgtgatgaacgtcacgtcaattacctctctaccccctatatttatgtgattgatatcacacaaaaggccgtcgactggacagttaaccgattcagtgccagatttcgcagtatctacaaggtccggctacctctgccgccacattaacaaaaaacctcgggcttccagcctgcgcgacagcaaacataagaaggggtgtttttatgagttccgatattaagatcaaagtgcaaagctttggtcgtttcctcagcaacatggtgatgccaaatatcggcgcgtttatcgcgtggggtatcatcaccgcgttatttattccaacagggtggttaccgaacgagacgctggcgaagctggtcgggccgatgatcacttatctcctgccgctgctgatcggttataccggtggtaagctggtaggcggcgaacgtggcggcgtagtcggtgccatcaccaccatgggcgttatcgtcggcgcagacatgccgatgttcctcggttctatgattgcaggtccgctgggcggctggtgcattaagcacttcgaccgctgggtagacggtaagatcaaatccggttttgagatgctggtgaataacttctccgcaggcatcatcgggatgatcctcgctattctggcattcctcggcattggcccgattgttgaagccctgtccaaaatgctggctgcgggcgttaacttcatggttgtccatgacatgctgccgctggcgtctatctttgttgaaccggcgaaaatcctgttcctcaacaacgccattaaccacggtatcttcagcccgctgggtattcagcagtcccatgaactgggtaaaagtatcttcttcctgattgaagctaacccaggtccaggtatgggcgtgctgctggcgtacatgttctttggtcgtggtagcgctaaacagtctgcgggcggtgcggcaatcatccacttcctggggggtatccacgaaatctacttcccgtatgtgctgatgaatccgcgtctgatcctcgcagtcatcctcggcggtatgactggcgtgttcacgctgactatcctgggcggtggtctggtttctccggcatctccgggttctatccttgctgtactggcgatgacaccaaaaggtgcttacttcgctaacatcgcgggtgtgtgtgcggcgatggctgtctccttcgttgtctctgctattttgctgaaaaccagcaaagtgaaagaagaagatgatattgaagcagcaactcgtcgtatgcaggacatgaaagctgagtctaaaggcgcatctccgctgtctgctggcgatgtgactaacgacctgagccacgtacgtaaaatcatcgttgcctgtgacgccggtatgggttccagtgcgatgggcgcaggcgttctgcgtaagaaaattcaggatgcaggtctgagccagatttctgttactaacagcgcgatcaacaacctgccgccagatgtggacctcgtcatcactcaccgtgacctgaccgaacgcgctatgcgccaggttccgcaggcacagcatattagcctgaccaacttcctcgacagcggcctgtacaccagcctgaccgaacgtctggttgctgcccaacgccacacggcaaacgaagagaaagtaaaagacagcctgaaagacagctttgacgattccagtgctaacctgttcaagctaggcgcggagaacatcttcctcggtcgcaaagcggcaaccaaagaagaagcgattcgttttgctggcgagcagctggtgaaaggcggttacgttgagccggaatacgttcaggcgatgctggatcgtgaaaaactgaccccgacttatctgggtgagtctatcgcggtgccacacggtacggttgaagcgaaagatcgcgtactgaaaacgggcgtcgtgttctgccagtacccggaaggcgtgcgcttcggtgaagaagaagatgacattgcccgtctggtgattggtattgctgcccgtaacaacgagcacattcaggttatcaccagcctgaccaatgcactggatgatgagtccgtcatcgagcgtctggcacacaccaccagcgtggatgaagtgctggaactgctggcaggtcgtaagtaatccaatcccaccctctccacatggagaaggtggggttaattgcctgatgcgctacgcttatcaggcctacaggatgcatcacaatttgttgaatttgcacgttcttgtaggccggataaggcgcttacgccgcatccggcgctgcccctctcctcacggagagggtttgggtgagggaaaagcctcaccccagccctctcgggtaaaaacattgatgaaggttaatactatgaaagcattacattttggcgcaggtaatatcggtcgtggctttatcggtaaactgctggcagacgcgggtatccaactgacgtttgccgatgtcaatcaggtggtacttgatgccctgaatgcccgtcatagctatcaggtacatgtggttggtgaaaccgagcaggtagataccgtttccggcgtcaatgctgtcagcagcattggtgatgatgtcgttgatctgattgctcaggttgatttagtcactaccgccgttggcccggttgtgctggaacgtattgctccggcaatcgccaaagggcaggtgaaacgtaaagaacaaggtaatgaatccccgctgaacatcatcgcctgtgaaaacatggtacgcggtaccacgcagctgaaaggccatgtgatgaacgccctgccggaagacgccaaagcgtgggtagaagaacacgttggctttgtcgattccgccgttgaccgcatcgtaccgcctagcgctagcgcaactaacgatccgctggaagtgacggtagaaaccttcagcgaatggattgtcgataaaacgcagttcaaaggcgcactgccgaacatcccaggcatggagttaaccgacaacctgatggcatttgtcgaacgtaaactcttcaccctgaacacgggtcatgctataaccgcgtacctcggaaaactggccggtcatcagaccattcgtgacgcgattctcgacgagaaaatccgcgcggtggtaaaaggtgcgatggaagaaagtggtgcagtattgatcaagcgctacggctttgacgctgacaagcatgcggcgtacatccagaaaattctcggccgttttgagaacccgtatctgaaagatgatgtagagcgcgtaggccgtcagccactgcgtaaactgagtgctggcgaccgtctgatcaagccactgctcggtacgctggaatatggtctgccacataaaaacctgattgaaggtattgccgctgcaatgcacttccgcagtgaagatgatccgcaggctcaggaactggcagcactgatcgctgacaaaggtccgcaggcggcgctggcacagatttccggtcttgatgccaacagcgaggttgtatccgaggcggtaaccgcttataaagcaatgcaataatggtggaccaggcgcaggacaccctgcgcccgaataacagattgagtgatatgcaggcaacaatggaacaaacccaggcctttgaaaaccgtgtgcttgagcgtctgaatgctggcaaaaccgtgcgaagctttctgatcaccgccgtcgagctcctgaccgaggcggtaaatcttctggtgcttcaggtattccgcaaagacgattacgcggtgaagtatgctgtagaaccgttactcgacggcgatggtccgctgggcgatctttctgtgcgtttaaaactcatttacgggttgggcgtcattaaccgccaggaatacgaagatgcggaactgctgatggcattgcgtgaagagctaaatcacgacggcaacgagtacgcctttaccgacgacgaaatccttggaccctttggtgaactgcactgcgtggcggcgttaccaccgccgccacagtttgaaccagcagactccagtttgtatgcaatgcaaattcagcgctatcaacaggctgtgcgaagtacaatggtccttagtctgactgagctgatttccaaaatcagcttaaaaaaagcctttcaaaagtaagcaacgtctgcttactgcccctctacctgcttcggccgataaagccgacgataatactccagacgttgtagatataacggcacgctttcatcgggtattccggacggaatcgcgttacggggaggaagttttttcagatactcccggaacgcctggctacttgccatgaaatctacggctttatcgataagaagcggaacgttttcacctaatttgcccatgatgatatctccgtattaccccgcgccgggaatgcgcggccgccaattttagtttaggttcccggtaaagatgacattaaggaaaacgtgctgaatcctcaataatcatccgctgctgtttattatcttttttctatagatttcttaattaatcaacgaattgcgcagtttttgagcatgttaatgattacgttacagaactattacaatgtcattagttgtgaacaaagcacctggtcgcgcatactaggggctataaatttatctttatcagaagccatcacatgaaagaagtcgaaaaaaacgaaatcaaacgcctcagcgatcgcctggacgccatccgccaccagcaggccgatcttagcctggttgaagccgcagacaaatatgccgagctggaaaaagagaaagccacgctggaagcagaaattgctcgcctgcgtgaagttcatagccaaaaactgagtaaagaagcacagaagctgatgaagatgccattccagcgcgcaattaccaaaaaagagcaggctgatatgggcaagctgaagaaaagtgttcgcggactggtcgttgtgcacccaatgaccgcactgggccgcgaaatgggcctgcaggagatgactgggtttagtaagaccgcgttttaagaacacagtatctacagggtgattctgcacattcctataggccgagtaaggtgttcacgccgcatccggcaagataaggcgctctggatcaacaacctaagggcaattctctgatgaggattgcccttttctttaccagacatctccccccacaagaattggccctaccaattcttcgcttatctgacctctggttcacaatttcccaattaaaactcacatcaatgttgccaatacataacatttagttaaccattcattgtcattatccctacacaacacaattggcagtgccacttttacacaacgtgtgacaaggagatgagcaacagactcattacacgatgtgcgtggactccaggagacctgcaatgaatctctggcaacaaaactacgatcccgccgggaatatctggctttccagtctgatagcaagccttcccatcctgtttttcttctttgcgctgattaagctcaaactgaaaggatacgtcgccgccagctggacggtggcaatcgcccttgccgtggctttgctgttctataaaatgccggtcgctaacgcgctggccagcgtggtttatggtttcttctacgggttgtggcccatcgcgtggatcattattgcagcggtgttcgtctataagatcagcgtgaaaaccgggcagtttgacatcattcgcagctctattcttagcataacccctgaccagcgtctgcaaatgctgatcgtcggtttctgtttcggcgcgttccttgaaggagccgcaggctttggcgcaccggtagcaattaccgccgcattgctggtcggcctgggttttaaaccgctgtacgccgccgggctgtgcctgattgttaacaccgcgccagtggcatttggtgcgatgggcattccaatcctggttgccggacaggtaacaggtatcgacagctttgagattggtcagatggtggggcggcagctaccgtttatgaccattatcgtgctgttctggatcatggcgattatggacggctggcgcggtatcaaagagacgtggcctgcggtcgtggttgcgggcggcagctttgccatcgctcagtaccttagctctaacttcattgggccggagctgccggacattatctctagcctggtaagtctgctctgcctgacgctgttcctcaaacgctggcagccagtgcgtgtattccgttttggtgatttgggggcgagtcaggttgatatgacgctggcccacaccggttacactgcgggtcaggtgttacgtgcctggacaccgttcctgttcctgacagctaccgtaacactgtggagtatcccgccgtttaaagccctgttcgcaagcggtggcgcgctgtatgagtgggtgatcaatattccggtgccgtacctcgataaactggttgcccgtatgccgccagtggtcagcgaggctacagcctatgccgccgtgtttaagtttgactggttctctgccaccggcaccgccattctgtttgctgcactgctcagcattgtctggctgaagatgaaaccgtctgacgctatcagcaccttcggcagcacgctgaaagaactggctctgcccatctactccatcggtatggtgctggcattcgcctttattagcaactattccggactgagtagtacactggcgctggcactggcgcacaccggtcatgcattcaccttcttcagcccgttcctcggctggctgggggtattcctgaccgggagcgataccagttctaacgccctgttcgccgcgctgcaagccaccgcagcacaacaaattggcgtctctgatctgttgctggttgccgccaataccaccggtggcgtcaccggtaagatgatctccccgcaatctatcgctatcgcctgtgcggcggtaggcctggtgggcaaagagtctgatttgttccgctttactgtcaaacacagcctgatcttcacctgtatagtgggcgtgatcaccacgcttcaggcttatgtcttaacgtggatgattccttaatgattgttttacccagacgcctgagtgacgaggttgccgatcgtgtgcgggcgctgattgatgaaaaaaacctggaagcgggcatgaagttgcccgctgagcgccaactggcgatgcaactcggcgtaagtcgtaatagtctgcgcgaggcgctggcaaaactggtgagtgaaggcgtgctgctcagtcgacgcggcggcgggacgtttattcgctggcgtcatgacacatggagcgagcaaaacatcgtccagccgctaaaaacactgatggccgatgatccggattacagtttcgatattctggaagcccgctacgccattgaagccagcaccgcatggcatgcggcaatgcgcgccacacctggcgacaaagaaaagattcagctttgctttgaagcaacgctaagtgaagacccggatatcgccagtcaagcggacgttcgttttcatctggcgattgccgaagccagtcataacatcgtgctgctgcaaaccatgcgcggtttcttcgatgtcctgcaatccagtgtgaagcatagccgtcagcggatgtatctggtgccaccggtttttagtcaactgaccgaacaacatcaggctgtcattgacgccatttttgccggtgatgctgacggggcgcgtaaagcaatgatggcgcaccttagttttgttcacaccaccatgaaacgattcgatgaagatcaggctcgccacgcacggattacccgcctgcccggtgagcataatgagcatagcagggagaaaaacgcatgattatttccgcagccagcgattatcgcgccgcagcgcaacgcattctgccgccgttcctgttccactatatggatggtggtgcatattctgaatacacgctgcgccgcaacgtggaagatttgagtgaagtggcgctgcgccagcgtattctgaaaaacatgtccgacttaagcctggaaacgacgctgtttaatgagaaattgagcatgccggtggcactggctccggtgggtttgtgtggcatgtatgcgcgtcgtggcgaagttcaggcagccaaagcggcggacgcgcatggtattccgtttactctcagcacggtttccgtttgcccgattgaagaagtcgcgccagccatcaagcgcccaatgtggttccagctttatgtactgcgcgatcgcggctttatgcgtaacgcgctggagcgagcaaaagcagcgggttgtagcacgctggttttcaccgtggatatgccgacaccgggcgcacgctaccgtgatgcgcatagtggtatgagcggcccgaacgcggcaatgcgccgctacttgcaagcggtgacacatccgcaatgggcgtgggatgtgggcctgaacggtcgtccacatgatttaggtaatatcagtgcttatctcggcaaaccgaccggactggaagattacatcggctggctggggaataacttcgatccgtccatcagttggaaagaccttgaatggatccgcgatttctgggatggcccgatggtgatcaaagggatcctcgatccggaagatgcgcgcgatgcagtacgttttggtgctgatggaattgtggtttctaaccacggtggccgccagctggacggtgtactctcttccgcccgtgcactgcctgctattgcagatgcggtgaaaggtgatatagccattctggcggatagcggaattcgtaacgggcttgatgtcgtgcgtatgattgcgctcggtgccgacaccgtactgctgggtcgtgctttcttgtatgcgctggcaacagcgggccaggcgggtgtagctaacctgctaaatctgatcgaaaaagagatgaaagtggcgatgacgctgactggcgcgaaaagcatcagcgaaattacgcaagatagcctggtgcaggggctgggtaaagagttgcctgcggcactggctcccatggcgaaagggaatgcggcataatcgtttgcgccccctcaccctaaccctctccctcagggagaggggaccgttcggcgctgtatgtactccctcactctgaaacgacaccgcactctttttttctccctcgcccctccggggagagggccggggtgaggggaaaaggccgcactgctcaccaattttctgctatcctgcccccgcactaagggggcagtatgctaaacatcgtactttacgaaccagaaattccgccaaatactggcaacatcatccgtctttgcgctaataccggctttcgtctgcatatcatcgaaccgatgggatttgcctgggacgataagcgcctgcgccgcgcggggctggactatcacgagtttaccgccgttacgcgtcatcatgactatcgcgcgttcctcgaagcagaaaatccccagcgcctgttcgccctcaccacgaaaggtacacctgctcacagcgccgtaagctatcaggatggcgattatctgatgttcggcccggaaacacgcggcctgccagcgagcattcttgatgccctgcccgctgaacaaaaaattcgcattccgatggtgccggacagccgcagcatgaatctgtccaatgcggtgagcgtagtggtgtatgaagcctggcggcagttggggtatccgggagcggtattgagagattaattactgtaggccggatagatgattacatcgcatccggcacgatcacaggacattagatcccatccccatactcaaatgtatggttaataccgttgaaatgctggtccatatccatacttggcttatcgctgtctggtttaccgacaatacgagccggaacgccagcggcggtggtatgcggcggcaccggttgcagcaccacggaacctgcgccaatcttcgcgccgcgcccaacttcaatattgccgaggattttcgcgcccgcgccaatcatcacaccttcacgaattttcgggtgacggtcaccaccagatttacccgtaccgccaagcgtcacagattgcagaatgcttacgtcgttttcaatcaccgccgtttcaccaacgacgatgcctgtcgcgtggtcaagcatgataccgcgaccaatttttgctgccgggtgaatatcgacctggaacgtcacagaaacctggttttgcagaaagattgccagtgcgcgacgcccctgattccacaaccagtgaccgatgcgataggcctgcaaggcatgaaaacccttcaggtataacaacggggtactgtatttatcgactgccgggtcgcgggtacgcaccgcctgaatatcacaggccgcagaggcgatcatttccgggtcagcggcgtaggcttcttccaccacttcacggatagcaatagcaggcataattgggctactcagcttgttcgccagcatgtagctcagtgcactgccaaggttttcgtgcttgagtagcgtcgcgtggtaaaaactggccagcattggctcacagtccgccagcgttctggcttcggctttaatattgttccagacaatttccagttcttcacagctcattgcttactccacacgatgagataatgaccggcccgttctgcgcgggccgggtcatagcggtaacaaaggttccctggggttagtggctgctgcgctcgtccttgcgtgcacgacctagtaaagtcaatgctgcctcgcgcgcgttttttccgcaatataatacttgataaatttcctcggttattggcatttcaacgccgaagcgatgcgccagttcgcggacttctttcgtattgcggtagccttccaccacctgaccaatcttctcctgcgcgctttgtacatccatgccctgaccgagcatcatgccaaaacggcggttacggctctggttgtcggtacaggtaagcaccagatcgccaagccccgccatgcccataaaggtggcagggtcggcacccagcgccgcaccaagacggctcatttcagccagcccacgggtgatcagcgccgtacgcgcattcgcaccaaaaccgataccgtcggacatccccgcaccaatggcaataacgtttttcaccgcgccgccaagctgcacgccaatgaaatccggattgctgtaaacgcggaaacttttgccgcagtgcagcagctgctggagatcatcggcaaaggtctgatcggtgctggccaggctaatagctgtcggtaaacctgccgccagttctttcgcaaacgttgggccagagataaccgccagcggaatttgatcgcctaaggcctcacgcgccacgtcctgtaacagacgtccggtttccgcttccagccctttggtcgcccacaccagacgcgcatcaggacgcatcagtggtttaatctggcgcagcacttcaccaaagacatggctgggtacgacgacgagaatattacggctggctgccagcgcagtggcgagatcgctttcaagatggagcgtatcgggaaaaggcacatcggggagaaacgcggcgttacagcggtcgcgttcaagcgttgcgatatgttcagggtcatggccccagaggacaacctcgtggccatttcttgccagggtgatggcaagagcggtgccgtagctgccggcaccgatcacagtcatactagcattacgttggttcatcaggcatcctgatgttcttcagtaccttcgccagcctgctgctgcaaatagttcatgaacagcgcatcgaagttaaccggcgcaaggttcagttgcgggaatgtaccgcgggataccatgctggtgatgcactcacgagcatacgggaacagaatgttcgggcagtatgctcccaggcaatgcgccatctgggtgccttcgatacccgcgatggagaaaataccgccctgctgaacttcacacaggaacgcggtttcttcgcccaaagaggccgttacggtaacacgcagtaccacttcgtatacgtcatctgccagttgggaagatgccgtatccagatcaagtttaacttctggttgccaatctttctggaaaacgtgcggcgcgttcggcgcttcgaaagagatatccttggtataaatacgttggatctggaaagtcatttcagtgttgttttgttcactcatgtgtagaaaacccttaagtgttgtccttaaatactgcgcaatgtaatgccaacgttcacacgttatttcagcaggggatccagtccaccacgtgcatccaatgcatacaagtcatcacagccgccaatgtgctgtgcgtcaataaaaatctggggaaccgtggtgcgaccgctgcgtttgatcatctcttcacgcttggcggcgttgccatcgatcggcagctcctggaaactcacgcccttgctgctcagcagtgcttttgcacgatggcaatacgggcaggtttctttggtatagatttcaacattggccataaattagctcctgtttttttaccctgaaatttcatgttgcagggcggcagcaaaatggagtgtccccagaagcttataacaataagtcgctgggggcctaattgcagctaacggcctgcatcatgaaagacgacaggtaaattatttgccgcgcaccaaaggcaagttttcgccagcccagccagcgacgccttctttcagcacgaatacttgcgcaaaaccagctttcgtcagtgcgtttgcaggctcctggcactgcatgccagaaccgtctaccacgataaccggtttgtctttgtgcttctcaagctcaccaacattgttggctttgatttcgctcggcaacagattaatagaacctgcgatatggcctttacggaagtcatcacgctgacgtaaatccacaaccacagcgtcttctttgttgatcagacgcgtagcttcaccacgagtaatcaccttcactttgctggtcaggctcttaaacgtagtcacaagaaccgccaccagtaacgcgatccaggcgatactcagtatgggatgacggccaacaaattgcataatttcttgcatggggggtaacaactcccgacgtagtgattaaaaaaaccaggaaaggagtatacctgcgcggtgcggcaaatacagccagcgcgttaactggaatgcaattttgcggggcgcgacgaaaaaaaagcgtaaatctggcatcggcttgccgcgagcggtcgtatattttgatcttcagaggctattttatcgattcagctgtagtaaaattacgcaaattttgactcttgagtatgaggttgtcgcaatgttggtttctaaaaaacctatggtactggtgattctggatggctatggctatcgcgaagaacagcaggataacgccatttttagtgctaaaaccccggtaatggatgcactgtgggccaatcgtccgcataccctaatcgacgcttccggtctggaagtcggtctgcctgaccgtcagatgggtaactccgaagtaggccacgttaacctgggtgccggccgcatcgtgtatcaggacctgactcgtctggacgttgaaatcaaagatcgcgctttctttgctaatccggtgctgactggcgcggtagataaagcgaaaaacgcaggcaaagcggtacacattatgggtctgctctccgcaggcggcgtacacagccacgaagatcacatcatggcgatggtagaactggcagctgaacgcggcgcagaaaaaatctacctgcacgcattccttgacggtcgcgacactccgccgcgcagtgctgaatccagcctgaaaaaattcgaagaaaaatttgccgcgctgggcaaaggccgcgtagcgtccatcattggtcgttactacgcgatggaccgcgataaccgttgggatcgcgtagaaaaagcttatgacctgctgactctggcgcagggcgagttccaggccgataccgccgttgctggtttgcaggctgcttatgctcgcgacgaaaatgatgaattcgtgaaagcgaccgttatccgtgctgaaggtcagccagacgcggcaatggaagacggcgatgcactgattttcatgaacttccgtgctgaccgcgcgcgtgaaatcactcgtgctttcgtgaacgctgatttcgatggcttcgcgcgtaagaaagtggttaacgtcgatttcgtgatgctgaccgaatacgccgctgacatcaaaactgcggttgcttacccacccgcttccctggttaacaccttcggcgagtggatggcgaaaaacgacaaaactcagttgcgtatttccgaaaccgaaaaatatgcccacgttactttcttcttcaacggtggcgtagaagagagcttcaaaggcgaagatcgcattctgatcaacagtccgaaagtggctacctacgatctgcaaccggaaatgagctccgcagagctgaccgaaaaactggttgcggccatcaagagcggcaaatacgacaccatcatctgtaactatccgaacggcgacatggtaggtcacaccggggtgatggaagcggcggttaaagcggttgaagcgctggatcactgcgtggaagaagtcgcgaaagcggttgagtccgtgggtggacaactgctgatcaccgctgaccacggtaacgctgagcagatgcgcgatccggcaacgggtcaggcacacacggcacacaccaacctgccagttccgctgatttacgttggtgataagaacgtgaaagcggttgaaggcggcaaactttctgacatcgcgccgaccatgttgagcctgatgggtatggaaatcccgcaagagatgactggtaagccgctgttcatcgtggaataatccctccccatgaggggaaaggcgattaataccatgacacgggccgtgaaaccgcgcaggtttgcaatcaggcccatcatctacgccagcgttcttagcgctggcgtattgttgtgcgccttttccgcccacgcggatgagcgtgaccaactcaaatctattcaggctgacatcgccgcaaaagagcgcgcggtacgccaaaagcaacaacaacgcgcaagcctgctcgcacaattgaaaaagcaggaagaagcgatctctgaagccacccgtaagctgcgcgaaacgcaaaacacgctcaatcaactcaataaacagattgatgagatgaacgcgagcattgccaaactggagcagcaaaaagccgcccaggagcgcagcctcgccgcacaactggatgccgcattccgtcagggcgagcataccggtattcagctgattctcagcggtgaagaaagccagcgtggacagcgtttacaggcttatttcggctatctcaaccaggcgcgacaagaaaccattgcccagttgaagcaaacgcgtgaagaagtcgccatgcagcgtgctgaactggaagagaaacagagcgagcaacaaacgctgttatatgagcagcgcgcccaacaggcgaaactgactcaggcgctgaacgagcgtaaaaagacgctggcagggctggagtcttccatccagcaaggtcagcaacagttgagcgagctgcgcgccaacgaatcccgtctgcgtaacagcattgcccgtgcggaagccgcggcgaaagcgcgtgcagaacgagaagcacgtgaggcccaggcggttcgcgaccgccagaaagaagcgacgcgcaaaggcaccacctacaaaccgaccgaaagcgaaaaaagcctgatgtcccgtaccggtggtctgggcgcgccgcgtggtcaggcattctggccggttcgcgggccgacgctgcatcgctatggcgaacagctacagggtgaattacgctggaaaggtatggttatcggtgcttctgaaggtactgaagttaaagcgattgccgacggtcgggtgattctggctgactggctgcaaggctacggtctggtggtggtggttgagcatggtaaaggcgacatgagtctttacggctataatcagagcgcactggtgagcgttggtagccaggttcgcgcgggccagccgattgcactggtgggcagcagtggcggtcagggtcggcctagtctctatttcgaaattcgccgccagggtcaggcggtcaatccacagccgtggttgggaagataagttttgtttccatttcgtcgtaacgttcttgcatttgccgctctgttggcgctctcctcccccgtacttgctggcaaacttgccatcgtcattgatgattttgggtatcgcccgcacaacgaaaaccaggtgctggcgatgccttccgctatctccgtcgctgtattacccgatagtccgcacgccagagagatggcgaccaaagcgcataacagcgggcacgaagtgttgattcatctcccgatggcaccgttgagtaaacagccgctggagaaaaatacgctacgcccggagatgagcagcgacgaaattgagcgcattattcgtagtgcggtcaataacgtgccctatgccgtggggatcaacaaccacatgggcagcaagatgacctctaacctgtttggtatgcagaaagtgatgcaggcgctggagcgttacaatctttacttcctcgacagcgtaaccatcggtaatacccaggcgatgcgcgccgcgcaaggcactggcgtgaaggtgatcaaacggaaggtattcctcgacgatagccaaaatgaagcggacatccgtgtgcaatttaatcgcgcaattgacctggcgcgtcgcaacggtagcaccattgccattgggcatcctcaccctgcaacggtacgcgtgttgcaacagatggtttataacctgccgccagacattacgctggtgaaagccagcagcttgctgaatgaaccgcaggttgatacttctacaccgccgaaaaacgctgtgcctgatgcaccgcgtaatccgttccgtggcgtgaagctgtgcaaaccgaagaaaccgatagaacctgtttatgctaatcgcttctttgaagtattaagcgaaagcatcagccagagcacgctgatcgtttacttccagcatcagtggcaaggctggggcaaacagcccgaagcggcgaagtttaacgctagcgcaaattaattagcgcaaattaaaggcgctacgcgtaatgcgatggtggctccgcgttttgtcgcgccattgccataagcggaaagaccacagtaacgcctggtaaccgaccttcacgctgcgcacattggtaatcaggcgcttatacataccggaagtaaatatctcggcaatcatccgttggcgggtaagaatatccggctctttgcgcaccgcatggcaaacacgcaatgcctcgtaagttatttgctgatgaaattccggataaatcataattttgtcggcataatttcgatttaatttctccagcaggcgggtaatcttaatatagtgacgttgataattaaggtttttattcccttgtctatgcaaccgactcacactcgtattatgcagataatatttatataaactttgctcggtatatcgcgcacgcagcgcgttaaacatgaattctgttgtccagacaatatcctgatgatgtaatccggcaataaatttaatgttatttttaacaataacatcacggcgataaacccccatccagacaacgtgagtccaacggcggctagaaagccccatccgcagccagtccgggccggttaatacgccggtactgcgaaggcgatcggtggggatggattgccaggtttctcccgtttcacgaaaacaccagtcagcgttgcactgcgccacgtcgaggtcgtcctctaacgccatggtcatcagcgtttcgtacatggtgggatagacttcatcgtcagcatcgacaaaagcgacatatttgcccgttgccacttcaatcccacgattacgcgccacgcttgcgccagcattcgcctgatgcaacaaacgaacgtgcggatagttttctgcgtaatactttgctatttcaacagaattatccgtactaccatcgttaataataatgatttccagagcagtccaggtttgcgtaattaaagattccatacaagtgcggaaatcatcgcccgcattatataacggaataataacactaagtttattggtgctgttcatcataaattaccgacgacctctgaagttatcctgacgttttacaggctttgtattaagaaactattaagcctgtgagatattatttttacaggtgagagagtcacttcagggtagagagataatgagagcagctatataagagatcagcacaattacgaactctttattacactgacaggattttacatatttaacagattatcctcagataaaagggctggaataccagcccttgttcgtgttaatcccagctcagaataactttcccggactggccgctacgcatagcgtcaaagcccttctggaaatcatcgatagagaaacgatgggtaatgatcgggctaagatcgaggccagactgaatcagcgccgccatcttgtaccaggtttcaaacatctcacgaccgtaaatacctttaatgaacaagcctttaaagatcactttggtccagtcgatagacatatcagacggcggaatacccagcatcgcaatacggccgccgtgattcatggtgtcaagcatggtacgaaacgctggcggcgcaccggacatttccagaccgacatcaaaaccttcggtcatgcctaactccgccatcacgtcattgagattttctttggcgacgttaaccgcacgggtgatacccattttacgcgccagctcaaggcggtattcgttaacatcagtgatcaccacattgcgtgcaccaacgtgtttcgccaccgccgctgccataataccaatcgggcctgcaccagaaaccagcacatcttcgcccaccagatcaaagctcagcgcggtatgcacggcgttaccgaagggatcaaaaattgcggctaagtcatcggaaatattgtcggggattttgaaggcgttgaatgccgggatcaccagatattcggcaaagcagcccgggcgattaacaccaacgcctatcgtgttgcggcacaaatgggtacgaccaccacgacagttgcggcaatgaccacaggtgatatggccttcgccagaaacgcgatcgccgatcttgaagcctttcacttcctgaccaatacctaccacttcaccgacatattcatggcccacgaccatcggcaccgggatggttttttggctccactcatcccagttatagatgtgaacgtcagtcccgcagatggctgttttacggattttaatcagcagatcgttatgcccgagttccggtacaggaacgtcggtcatccagatgccctcttccgctttcagtttggataacgctttcatctcacatcctcaggcgataacgcccagttgtttaccaatacgcgtaaatgcttctactgcacgcgtaatttgctcaggggtatgcgccgcagacatctgggtacgaatacgcgcctgacctttcggaacgaccggatagaagaaaccggtaacgtaaatgccctctttttgcagctcacgggcaaatttctgcgccactaccgcatcaccaagcatgaccggaataatggcgtgatcggctcccgccagggtaaagcccgccgcgctcatttgctcacggaactgacgcgcgttcgcccacagacggtcacgcagttcgctgcccgcttcgaccatctccagtactttgatggacgcggcaacaatggccggtgccaggctgttggagaacaggtacggacgagaacgctggcgcagccactcaaccacttctttgcgcgccgcggtataaccaccagaagccccgcccagcgctttaccaagcgtaccggtgataatatcgacccggcccatcacatcgcagtattcatgggaaccacgaccattttcaccgacaaaaccgaccgcgtgggagtcgtctaccatcaccagggcatcatatttatctgccagatcgcaaacgcccttcaggttggcaatcacgccgtccatactgaacacaccatcggtggcgatcagcacatgacgcgcaccggcttcacgcgcttctttcagacgtgcttccagctcctgcatatcgttgttggcatagcgatagcgtttagctttgcacagacgcacaccatcaataatagacgcgtggttcagtgcgtcggagataatggcgtcttccgcacccagaagcgtttcaaacaggccaccgttagcatcaaagcaggaagagtagagaatcgcatcttccatccccaggaaggccgccagtttttgttcaagctctttatggctgtcctgagtgccgcaaataaaacgcacgctagccatgccgaaaccgtgagaatccattcccgcctttgccgccgcaatcagatcaggatgattcgccagcccgagatagttgttggcacaaaagttaatgacgtggcttccatcagccacagtgatatctgcttgctgcgcagacgtaataatgcgctcttctttaaacaacccttccgcccgtgcggtttccagatcgttggttaactgctgataaaattctccacgcattgcgattctccagacagggcaaattccagcacatattacccaaacttataggtcgcgacgagataacgcgttaacacttctgcaaaattcaggataaataacgtgtaacttgatgtctctcaacacctacagatagtagaaaaactgtacagttttggctgggcataatgatgattgattttactgcattgatataaaaagaaaaaatgatgccaaagcatcatttttcctatctcagttggtatcaaaacgctacccactaatggagggaaacttattttctactaaggaaaattctcagcgcctgcatttttgcccctaaagtgttactcctgaagcagcgaaacaaatcgaaccattttcctctccccagatagtttaggttgaagagatcggggcgtttgtaatagcacatgacaaaaatgccctggtcatcgtccacaatgttattatttagtgttattttttgactttccagaactaatttatagaattctttccatttatgctgactaccaacaattgcgcccccaataatatatacatgattgccaatcatgaaatcaaaaacctgttgttgagatgtgacagtaagccctttttttatagtgaaaagatgcatcttactttcatcaaatgggaaatcccaaattttcaatcctcgagttacatttggcttatggcaatagccaaaatctatccacgcaacaagaggcgttttcactaagcccatgttgatagctttatttacaaaataggccttaaggttacataccaaaacatactctggactccagtactctgggttttttaattgtcgaggctcaagtctatttgtaaagctctcatctttttgaattttttcgatacgacttctgatatatctaaatttcttttttatatcgataacgataaccgttgttggttttccgttgcgaatcgcttcaacccttggtttcaaatcgggagaagtgaaaataatcatctcattttcaagtgcggccagacgctcaaagtaactaaaataaacatcaacactacgagctagtttttcacggaaccctttattagcagtccaatcccctctaccaatgtcaaaatatgcagtgataattgtggtggaacttttcattactaataagaccattaatataaaaaaagaattatatcataaatattaatagaatgtatactgtatattatccattcaaatgcttccgttatttatcatacatcggaatattgatactaaagcactattcacatgcaaaaccaacatccgccatgaaggactagctaaaacccaaactagtttgttgcaattagcatccttgcacctctatgtaaagggctgaagggattcggatgtgatggtatgattacagacattcgtgtctgagattgtctctgactccataattcgaaggttacagttatgatcatcgttaccggcggcgcgggctttatcggcagcaacatcgttaaagccctgaatgataaaggcatcaccgatattctggtggtggacaacctgaaagacggcaccaagtttgtgaacctggtggatctgaatatcgcagactatatggataaggaagacttcctgatccagattatggctggcgaagagttcggcgatgtcgaagcgattttccacgaaggcgcgtgctcttccaccaccgagtgggacggcaagtatatgatggataacaactatcaatactccaaggagctgctgcactactgcctggagcgtgaaatcccgttcctgtacgcttcttccgcagccacctacggcggacgcacctccgactttattgaatcccgcgagtacgaaaaaccgttgaacgtctacggttacagtaaattcctgtttgatgaatatgttcgtcaaatcctgcctgaagcgaacagccagattgttggcttccgttatttcaacgtttatggaccgcgtgaaggccataaaggcagcatggcgagcgtcgctttccatctcaacacccagcttaacaacggtgaaagtccgaagctgtttgaaggtagcgagaacttcaaacgcgacttcgtctatgtgggcgacgtggctgatgtgaatctgtggttcctggaaaatggcgtttccggcatcttcaatctcggtactggtcgtgcggaatccttccaggcggtagctgatgctacgctggcttatcacaagaaaggccagatcgaatacattccgttcccggataaactgaaaggccgctatcaggcgttcactcaggcagatctgacaaatctgcgcgcggcgggttacgacaaaccgttcaaaaccgttgctgaaggtgtaacggaatacatggcctggctgaatcgcgacgcataagagctctgcatgaaaatactggtgatcggcccgtcttgggttggcgacatgatgatgagccaaagtctctatcgcacgctccaggcgcgctatccccaggcgataatcgatgtgatggcaccggcatggtgccgtccattattaagccggatgccggaagttaacgaagctattcctatgcctctcggtcacggagcgctggaaatcggcgaacgccgcaaactgggtcatagcctgcgtgaaaagcgctacgaccgcgcctacgtcttacccaactccttcaaatctgcattagtgcctttcttcgcgggtattcctcatcgcaccggctggcgcggcgagatgcgctacggtttactcaacgatgtacgcgtgctcgataaagaagcctggccgctaatggtggaacgctatatagcgctggcctatgacaaaggcattatgcgcacagcacaagatctgccgcagccattgttatggccgcagttgcaggtgagcgaaggtgaaaaaagttatacctgtaatcaatttagccttagtagtgaacgtccgatgattggtttttgcccgggtgcggagtttggtccggcaaaacgctggccacactaccactatgcggagctggcaaagcagctgattgatgaaggttatcaggtggttctgtttggcagcgcgaaagatcatgaagcgggcaatgagattcttgccgctttgaataccgagcagcaggcatggtgtcggaacctggcgggggaaacacagcttgatcaagcggttatcctgattgcagcctgtaaagccattgtcactaacgattctggcctgatgcatgttgcggcggcgctcaatcgtccgctggttgccctgtatggtccgagtagcccggacttcacaccgccgctatcccataaagcgcgcgtgatccgtttgattaccggctatcacaaagtgcgtaaaggtgacgctgcggagggttatcaccagagcttaatcgacattactccccagcgcgtactggaagaactcaacgcgctattgttacaagaggaagcctgacggatgcgggttttgatcgttaaaacaagcagcatgggcgatgttctccatacgttgcccgcactcactgatgcccagcaggcaatcccagggattaagtttgactgggtggtggaagaagggttcgcacagattccttcctggcacgctgccgttgagcgagttattcctgtggcaatacgtcgctggcgtaaagcctggttcagcgcccccataaaagcggaacgcaaagcgtttcgtgaagcgctacaagcagagaactatgacgcagttatcgacgctcaggggctggtaaaaagcgcggcgctggtgacgcgtctggcgcatggcgtaaagcatggcatggactggcaaaccgctcgcgaacctttagccagcctgttttacaatcgtaagcatcatattgcaaaacagcagcacgccgtagaacgcacccgcgaactgtttgccaaaagtttgggctatagcaaaccgcaaacccagggcgattatgctatcgcacagcattttctgacgaacctgcctacagatgctggcgaatatgccgtatttcttcatgcgacgacccgtgatgataaacactggccggaagaacactggcgagaattgattggtttactggctgatagtggaatacggattaaacttccgtggggcgcgccgcatgaggaagaacgggcgaaacgactggcggaaggatttgcttatgttgaagtattgccgaagatgagtctggaaggcgttgcccgcgtgctggccggggctaaatttgtagtgagcgtggatacggggttaagccatttaacggcggcactggatagacccaatatcacggtttatggaccaaccgatccgggattaattggtgggtatgggaagaatcagatggtatgtagggctccaagagaaaatttaattaacctcaacagtcaagcagttttggaaaagttaagtagtttataaaggtaaaacatgctaacatcctttaaacttcatagtttgaaaccttacactctgaaaagtagtatgattttagagataataacttatatattatgtttttttagtatgataattgcattcgtcgataatactttcagcataaaaatatataatatcactgctatagtttgcttattgagtctaattttacgtggcagacaagaaaattataatataaaaaaccttattcttcccctttctatatttttaataggcttgcttgatttaatttggtattctgcgtttaaagtagataatagcccatttcgtgctacttaccatagttatttaaatactgccaaaatatttatatttggttcttttattgttttcttgacactaactagccagctaaaaagtaaaaaagagagtgtattatacactttgtattctctgagttttctaattgctggatatgcaatgtatattaatagcattcatgaaaatgaccgcatttcttttggtgtaggaacggcaacaggagcagcatatagtacaatgctaatagggatagttagtggcgttgcgattctttatactaagaaaaatcatccttttttatttttattaaatagttgcgcggtactttatgttctggcgctaacacaaaccagagcaaccctactcctgttccctataatttgtgttgctgcattaatagcttattataataaaagtcccaagaaattcacttcctctattgttctactaattgctatattagctagcattgttattatatttaataaaccaatacagaatcgctataatgaagcattaaatgacttaaacagttataccaatgctaatagtgttacttccctaggtgcaagactggcaatgtacgaaattggtttaaatatattcataaagagtccttttagttttagaagtgcagagagtcgcgctgaaagtatgaatttgttagttgcagaacacaataggctaagaggggcattggagttttctaacgtacatctacataatgagataattgaagcagggagtctgaaaggtctgatgggaattttttccacacttttcctctattttagtctattttatatagcatataaaaaacgagctttgggtttgttgatattaacgcttggcattgtggggattggactcagtgatgtgatcatatgggcacgcagcattccaattatcattatatccgctatagtcctcttactcgtcattaataatcgtaacaatacaattaattaagaataaacaagtttaagaagtgagttaaaactcacttcttatctatacaacttaatctctttacactattagttaaagtttcagtatcgatatcttttaccgtatatgttggggatactatttgtatagatttatgatgattcggggaccaaattaaatggctgggatattccggagtacgactattagggtaaaatgcaagcgttggtttatgataagccgcagcgatatgaacaagagctgtatcaacagaaatgacaaaatcactatacttggtcaacgcaacggtataaataaactcatcaaatggtagtgtttcgatttcaagtattggtattgtcaataaatcttgcggtaacccggtaaatataatccgataattttcaaagtgtgttttcacttcttgatatataacttttatttgctcaaacgtaagacggcatattttttttgcacctaatggattaataatgactattcttgtatctccaataaattcttttattttatcttcaacatctactggtaaatgcaagtcgtagttggtggaaaatttaccctcaccataaatatgcttcagtatttctattgctcgtgtactcatatgttcttttaaacattcatcgtggggatggtaaaaactatagtaacgcttataccaatgatcaaaacccagaatgtaagaatcttttaaactacttaatattaagctatgcttaaaactgggcatagtttcaaaggggtctaatacaatatcgaactgtaaatcccgcagatgcttacatagagtaagcatttcaagaaaaccggtactttctttaatacagaactcaaatatatttttattattagagagaaattccccaccctttctatttgtgagaagagttattttaacccctttactataaagttcacgataaatgctacttaatacaattagatcaccaagtttattattatcatgaataataaggcaacttttaacttgtgctggatctgtaatttgattatttattttattacgaaataaaaaagaaaggaaattaatcttgattttgtttatataaaatcttttctttttgtgaaaagttcctaagcgcatttttataccatattattttagtttcaggatgattaattagcataagaatcggtactagttctatattgcattttttttcttgtcatatctttactttcttctgcactgatgtcttgaagtttaataaatggaattacatcgtaagaaatagctgtatcatcacttaaattataaatattaatatcttttacattatcatgcataaaacgaaaaaatggcaatattttgaataaatccctacttaattcgctgggcatgggatttttattctcatcatagaaacgagaacagctacccgttaaatcaagaccagaacaaataatccgcgcatacttaagactatatgcgatttgaattgcagcaaaggcaatagtatggcaactgcaataaccaagactaatgtccttgcaaaatccaaccagacgaccttttttagacaacggtacagagatcagcagttctttgtgaatctgtctcaaaatattaaatttaatcttctttataaaaccacctttttcccgacggtaaaaggaccgtaatacgaggcagttctggaggatataaagtttatcttctttggaagcgtgttcataaacgtcaacgtttactatggtataacgacttctctggctaaatttataaaaatcatcacgacgctgatgtaaaaatcggacatctgtaagtacatatataaaaggaacgatattattacttaacagatattgcgcagaaccattgacagcaataatatcctttgttcgtaatacactcaaaggtgttttttggcttgtagggccgctaagaaaaataataacatcatcagatattttattttcaatcaggttttcaacatcttttttgtcaatgtatctaatattcttcatgataaacctgtgaaataaataactccgcttaaaactgtcctggtgaagacatgtaattgtgggattttttttagcgcgctggtttccctttcaaacgccgcataaaattgcgcatttttttacgatatactaaaagataatagcctagatctctaatctcatttttaataccgtaatgacgctctaagtcaatacgatctttcgctttacgctgcgcactagcacgctttccggagagatcgataattcgaacctcaccattttttataatgaagttaccacgatgggggtcgccagaaaccatgccatgttgatgtaaggcattaatactttgctgaattttattttttagcgcatcatcaatatcgggcatatcacacaactctatgccatcaatatactcgatgatcatgatataagtatggacaaaacgtaaggttttccgttcagccaataaataaaagtcattgagtgtatttaacccttcatttcgtactttttgggtttgctcaaaaaggcgttcgtaataatcaccttttaacagagacttaaagaaacgttcgttacgcttaactttcggagaaaaaaccttaagaatcaatttaccgtaatcggtatcaataagcataacttttgtatcatcaatagaacgaaaaaccttgatgatatttatattataagacaagaagtcatttaatacattgaggtacttactattgttttcatcggtaaaaacaaccaagtctttgatcttgctcttctgaatcataataaaccagttaaatgttatttacggtaatattttcggcaaagataacagactcctgctataattcctgagatataatgatgttgcactaaaagatgtttatatcttttttaaattcaataattgatttcgcatctcgtggagagtcatctttccagggggaattttctaaagctattttatagtattttaccgatggataaattgcccatttgtgccacggtttagttgcacctgtataatgaataagaagagtactttctgtaatcagctttttatagttttgatgtgttttgtcttttaattcacttttaattgtataaattgtattgtactcacgaggcaaaaataatgtcatccctttcagtaagacattcataacatcctgatcagggtatttataaacattatctttactcataagaatagacaacgctttttctgttagttttgcgtcagcccattttcttaagtctaaataaacgacaccggaattaaagtactgcccaagtaattcaggatcagacaacctggataccgccttttcttgcattggctcaacatctttaacaacagcagcaaccgctccatttaaacccagatgtaatagttggctaatatcgcctttacaaacaacatctgcatcaagataaagcaaacgatcaagcgttaaacccaataattgaaatgcaaataaacggaagtacattgctcttgaccagacctgtgtacaaggcaagcactggagcttatcagtgttaattctatataacgtgattcttaattggttttgctctgcaagctttgcaattttttgaaaaaaaccatcattataaacatcagcaataatataaaaatcaagattaatatgtcgattatttaggacaattgatgtgatggaaacacctacaccatcaagataattagcatcgacaccataggcaacatttaaacattcagaagtatttatattagctagccgaaaatcccaggctttaactttatctatctctatggcaggaaatgagtccacaatgctacccttatatcattactttatagtttcccagttttaatgctttatcttttcaataaaataaaaaagatagttgctaaatccttttagatatctatgctttttaagcatatgttttgcgctatatcttaattgattgctattgttcggtttcagcaacgccgtattcttccatgggctagcattttttgcctccataaaggcttgacttacaggataatcccaggcccaatcatgccagggcttggttggcccgatataatggataaaaatagtatcgttggttactgggtttataaagctttctttgagttgataatttaagctgaactgggtgttatatttaatatcagcgaaaataagtttatccgccagcaacatatttaacacatcctgatcaggatgtgttatttttttgattatttctggctcatttagcattgcaatagctcgtgcagaaacctgctgagccgcccattgggcagtattaatcaataaaaaaccggagttaaagtaacctttagcaattcccgcaacacctaagctatgggcgcgtttttcccaccagtcagcttgcccttctgtaacaaccattgcgactttatcgtcaggaaaactgaaattaattagtggctcaatagtcccctgacaaatgatatctgcatccagataaaggactttaggcgccttattaataaagtaatctgcaataacaaaacgaaaatatattgcatgagtccaattcttagtgctaggcaaactgcgcagtcgatcaccattaatcagatatattttaattctggttttatactgcaacgccagggcatcaaaatacttacgatcatcatcaccaaaataatcagtaaaaatatggaaacacaatcgacttccttcattatattttaatatactagcaatgctaattccgcaaccaaatagaaagtttttgtcagttccataagcgatgtccagacaaagattttctgtttctactttatgatcataatcaataacactattaagaaactcagtttcctggaaaaacacctgctgcattatttcctccgggaaatagcagaaataattaccttatgtaatctatcgtaatacttgctttggtaaaattcatcgatgctcgcaggaattttttcatgttcgatatgaatttcacctgctatatatttatttagaagagttacaaaaccagcaatatctcccggttgatacagatggccattgacatcaggttgaataatgtcagcaggcccggagacacaatcggcactgatacaaggaatcccccagctcaaggcttcaagtagggtcattgggaaaccttcaaaagaactcgtgagcaataacgcactcactttttcaatatcttgctggaccaattcccagggatattgttgccaaccataccagacaattcgatcatcaatatttaattctctaccataagcctggcatttttcgaaatcggagccatcacccaatacatggagtttccagttacctttcgcttgacttaagccatcaagcaggtctttaactcttttctggccttcaaatttcatacgcccaacataaataaacgttgccgtttcaccttcctcgggcgcgggaatgacactgtctttagtttcgacgggattaaaaataacatttatcgtgctttctgctacacctcgattaatcatttgctgtttaatgccagagctgattgctaaatgatagtcggcacaggtgatatattcagcatgttttttgtgatctaaagaaaaatgtggccaactaaatactggcatatcaattccactttttttacgtgcttttgcggcaaacaggcaggagatcacatcaatacaaataacgatatctggttggtactcctgaagccatttacttagagcatgaatatgtttcgcccgacgcaaaaaacctaaacgaatattggaaaaactacaactgtatttaataccttccagccatcccttatccattttgtcattacgacaaaagaaaaacatttcactttggatatgttgttgcctgaaggtagtaataacatcacggatgacagtttccatgccgccaaatccagaaacagcttcgccgataaacgctattttcatagaaactctcattaattgagtaaaactcactgttttaacggttttatttgtctataaaatcagaaacaatcgtactcatcattttatctggactgaatttatataaactatcataatccattggtttaacagaactgttaataaaatactctaacttatcccaatcatcatgacctattataaaaaagcgagattcactatagatttcactaccaaatacatttatattattagtaattaattttttattgaaaaatagtgcctcaagtatacgaagagtccagccagattggttttctttggttatatcaacaattatattagcatttaatgttcttctaatattctcttcataagatatttgtttttcaatcaaatacttactagtcgtagaacttgtcttatctttgacaacattaaaatctagcttacatcctagtgttgttaatctctcggctaactcattaattatttgaagacgccctttatcacgaccaaggaaaaaacatattggctggctgttatttttgtcagataaactataatttctaatttcatccattcctataggaaaaaattgttctattgccttgatcttttcattccctataaatctatgctcaaaatcatatataatatcgaaataattcgcgttatcaagaataaaatcttcgccaacagtatttcttagaagcaaaactttatgacagttaatattttttaatatttgtttattgatacctttattaacaacactgtcattaatgataattatgtcatcttttttaatatcattgaggtaatgcttgatgaataatcgccccagccatgcattatccatccctattttacttatttttttattaatccagttatatttttttggtgttgttatattttttatcttgtacttttttttcaggtactgaatcatttttaattcataatctgcaacccaatttataaaataaatagtcataataaagttagttccagtacatactaataaatatttttataatcctttgcgttgtgttcgctctttaatacgctcggccttaacgcttgccatgttcaataaattctgttcaagagacaatattttgcgtaaaggcatcccaaaataaaccttcataaatcgccagatatctctttgcgtcaggccaatattcatactactgaaatataaaccaatcaggtctttatcgcgccagcggcgcggtacttttgcacgtatctgtgcccgatgcagatcgataacactaatttttaattcatcttcccggccagtaaatggcaaatgaagcaaaaagtggcaaatgtaacagtcgcggtgatttatccctgcagtatgcattttacgcaccatagttgctacacgtgcgatcagcatacgcttaacacgtatatcaggcgggttgactgcccaatcggcacaataatcttcaaggctaattgtgggagtgagatcttcggtaataataaaacttgcgcgagttaatggatttaaccctttttcgccaaacccaatgcccttcattgtatcaacgccaacatcactcaggcgatgaatagcgtgccactctctgtctgcgcccaaaacgggcatccgcaaactgagtagattttttataatctcttttaatgtcgtccccttgtgccatttaagaaaatagcttttcccggacagttcaaagcgtaatgtacgacgagtctccagttcacgaaagacctcgccgttcagttttttgacctctgcaaaagcatctttaccacgccaaagtgtggcaagcggctcttttaattcaaccatctaaaccacctgtaatgatatccgcggctttttctggcaagctatacaaatcctgagtatcggcataatggcgagcattctccgcccaggccattcgcaatgggctctgagttaacgctttacgtaaaacttcatttaattgttcctgagagaaaggttcagcgatgaccgttccacaattggcatccgcaatataatgcgcgtacccacataccgctgttgttaaaacaggtaacccagcagtgatcgcttctagaagaacgatacccgcggcttcctgataagcgggatgcagtaataaatcagcggctgccattaattcactcacatcattgcgaccggagaagaaatgcacattgctccgcacgccgagtttttctgccagcgcttcaaattttcgcggcttatcctgaccaacaacaaataaaagcgtattgtgacgtaaactttccggtaagcttgccaaagcttcaatactgcgatctacacctttacggccaaaatcacttccaacctgcagtaataagttttgttgctcttttatgccatttttctggcgataaatttcacggctgtttgggatttgctcactgtattttctgtccggataaataccgggaggaagaatttgaaaacgttcaggttcagtttgataatgcttctggaaatcggcgatttgcttatcggtcagcatcataagtttcgtgcttttaccctgctcgaaagtcgctcgctcaaatgcggcataatggcgatatcgacttgttaaacgatataaaaaacctttttcttgcgcaactttctcggcgtaacaaacatcagcggcaaaataaacatccaggccaggcatcttattaaacccaacaacgcgatctgcgggatgctctttgagatgattttgtacccaggcataatattctgcattgcgtccatggttggtatgggacttaactggcacctgaataagctcaaatgctttcgggcaatcgccttcccagctctgtgtatatacccgaacatggtggccccgtgcggcaactgtacttgcaatgcgcataaagtcacgttgaagcccaccaaatggaaaatatttatataaacaaaacgccacgatcataattgtgcattcctgtcagcactaggggcatcttctggcaacagcttttccgtagcggcgatcacatcctccgctgggataacagaaagatattttttgttgcggtcaagttcatgccgggtcggcattttctgataattccccgcccagaattgaataatattctcggtccagggacgccagaatacgtgatccgttgcaccaaatagactaatgactggcgttttcactgccgctgcaatatgtcccggcgcagaatccacaccaataaaaagcactgcatgatcaattaatgcacccagttcaggaaaacgtgttttacctgcaaggccagtaatgggttttgtttcgcaacctcgtgcaatctcatctacacaagcgagatcatctgcgctgggcccacaggttagcacaacctgatagcctcgctgttgcagcgcatcgataaccttagaaaatttatcgttatcccaacacttaaatatctgacgcgctgtcggttggatgacaacataatgatcttttacgcccagggcatctaattcccggcgcatcttcttccagcaatcttcggcgtaactcattgttgtgtcggtgtagaaatcggtaatacctaatggctcaaggacgcttaaattacgctcaacaatatgtgtaccgtgtattggcgctaagtgtgtgaagctttttttccaaataccatgctgccgatgaccataaagttggcttattttcatccgtgcaggtaaacaacgtaccagcagcgccaccatccactgatccgtaagattaatgaccaggtcataattattcgcacgcagagtttttatcaagctaagcacatttttaattttatcgaaagttcccgcacctttattgcttatcccatagagcgcattaatttccgggttttcagacaaaatagggatggtgtcctgataaagcagcatatcgatttttgcatcaggataattctgcttgagcgtactgatgacaggagtagttaataacatatccccatgatatcgcatctttatgaccaggatttttcgaaatggcttttccactagcgactcttttgtgtgattgtctggttaagttaagcagaaaaaagcacgctaccgccccaggctcaacagctacctgaatactgataacgcacttactttgacgtgctagtgtatcatttctttcgcagcaatccgacccgaatgatttttatacacaaaatatactttaatcataaaaatcaaatagataaaaaatagcatttcgataatgtcagtacggcctatgtagatttgaaaatggggccgagtttcaatgaatcgcataaaaatacaaaaaaaatgaagatgtagcggcagatcagaccaaactgaagctatttaagtcaaaaacgggaaaagtaatggtaaagccacagctaaatacatagaatccccagcacatccataagtcagctatttactatgctcgaattgctttacaccgcccttctctaccttattcagccgctgatctggatacggctctgggtgcgcggacgtaaggctccggcctatcgaaaacgctggggtgaacgttacggtttttaccgccatccgctaaaaccaggcggcattatgctgcactccgtctccgtcggtgaaactctggcggcaatcccgttggtgcgcgcgctgcgtcatcgttatcctgatttaccgattaccgtaacaaccatgacgccaaccggtagcgagcgcgtacaaagcgctttcgggaaggatgttcagcacgtttatctgccgtatgatctgcccgatgcactcaaccgtttcctgaataaagtcgaccctaaactggtgttgattatggaaaccgaactatggcctaacctgattgcggcgctacataaacgtaaaattccgctggtgatcgctaacgcgcgactctctgcccgcagcgccgcaggttatgccaaactgggtaaattcgtccgtcgcttgctgcgtcgtattacgctgattgctgcgcaaaatgaagaagatggtgcacgttttgtggcgctgggcgcaaaaaataatcaggtgaccgttaccggtagcctgaaattcgatatttctgtaacgccgcagttggctgctaaagccgtgacgctgcgccgccagtgggcaccacaccgcccggtatggattgccaccagcactcacgaaggcgaagagagtgtggtgatcgccgcacatcaggcattgttacagcaattcccgaatttattgctcatcctggtaccccgtcatccggaacgcttcccggatgcgattaaccttgtccgccaggctggactaagctatatcacacgctctagtggggaagtcccctccaccagcacgcaggttgtggttggcgatacgatgggcgagttgatgttactgtatggcattgccgatctcgcctttgttggcggtagtctggttgaacgtggtgggcataatccgctggaagctgccgcacacgctattccggtattgatggggccgcatacttttaactttaaagacatttgcgcgcggctggagcaggcaagcgggctgattaccgttaccgatgccactacgcttgcaaaagaggtttcctctttactcaccgacgccgattaccgtagtttctatggccgtcatgccgttgaagtactgtatcaaaaccagggcgcgctacagcgtctgcttcaactgctggaaccttacctgccaccgaaaacgcattgaggttgttatgcaaaaacgggcgatttatccgggtactttcgatcccattaccaatggtcatatcgatatcgtgacgcgcgccacgcagatgttcgatcacgttattctggcgattgccgccagccccagtaaaaaaccgatgtttaccctggaagagcgtgtggcactggcacagcaggcaaccgcgcatctggggaacgtggaagtggtcgggtttagtgatttaatggcgaacttcgcccgtaatcaacacgctacggtgctgattcgtggcctgcgtgcggtggcagattttgaatatgaaatgcagctggcgcatatgaatcgccacttaatgccggaactggaaagtgtgtttctgatgccgagcaaagagtggagctttatctctagtagcttggtgaaagaggtggcgcgccatcagggcgatgtcacccatttcctgccggagaatgtccatcaggcgctgatggcgaagttagcgtaacgtttatgccggatggtatgccatccggcgcgcatgaattacttctggcactgccgacaataaaacgttgcccgctgcgcatgtttagtcgccacaatcggcgtaccgcacacccgacacggctcaccttttcgcccgtaaacctgcaattcctgagcgaaatagcccggtttaccatcactttgcagaaaatctttcagcgttgtaccaccctgctcaatgctacgcagcaacaccgctttaatcacccgagctaacaattcacactctgccaggctcagactactcgccagccgatccggatggatccccgccgcaaacagactttcgctggcatagatattccctacccctaccaccagcttgttatccatcagccacggtttaatcgccgtttttttcttcgcgcacttctgatgcagatactcaccattgaaatcgtcgctaagcggctccggtccaagatgggtcagcacattatgcccttccagctctttggtccacagccaggcaccaaagcggcgcggatcggtgtagcgcagcactttgccgttgctcatcaccaaatccacatggtcatgcttttcagggggaagttcttctggaaggatgcgcaggctgccagacatccctaaatgaatgataatccagccctcaggcagctccagcagcagatatttagcccgccgctgcacgctaagcactggttggtcgcttaaacggtagatctcttcactaaccggccagcgcaagcgtccgttgcgcaccactgcatgaagaatggttgcaccaacgagatgcggttctatgccgcggcggctggtttcaacttcgggtaattcaggcatagcatctccaggaatgaacagatgcagtcaatatgggggcaagcagataacaaaaaaccccgccggagcgaggttttttgttacatcaaagcgagaattatttgattttcgcttctttgtagatcacgtgctggcgaacaactggatcgaattttttcagttccagtttttccggcttagtacgtttgttcttcgtagtggtatagaagtgaccagtaccagcagaagaaaccagcttgattttctcacgaatacctttagccatgatttatttcctctaagtacttagtacttttcgccacgggcacgcagttcagccagaactgtatcgatgccttttttatcgattacacgcatacctttagcagatacgcgcagggtgacaaaacgcttctcgctctcaacccagaaacggtgagagtgcaggttcggcaggaaacggcgtttagtcgcgttcagtgcgtgggaacggttgttaccggtcaccggacgcttgccagtaacttggcagactcgggacatgtctattctccaaaaatcaaattagctcgagcttcgtatggggtattggcgcctcgtcaggctttacagcccggtcatcgcagttctatgtgaactctcgattgccaggcccaaatgccaaacccgagattctcaaaggtggcgtagtatacgctgactcagcgatgtgctcaagtcccgaacagacaaagatcccgaaggatcgcgcatagcgggttaaatccagccgcgttcggcaaaagaaacatactctccacgcccaatcacgatatggtcgagcacgcgtaaatccatgaactgacaactctttattatccgttcagtaatgagtttatccgctttactgggttcagcacaaccgctagggtgattatgtgcaaggatcagcgcgctggcgtttatttttatcgcttcgcggataatttcccgaggatggacttcaacatggtttagcgtgccggaaaaaagacgcctatgcgttataacccggtgttgggagtcgagaaagatcaccataaagatctcccgctcctcacccgtgagctggctttgtaaaaattccctcgtcatctccgggctgagtaaagggctttcttcacgcatccgcacgttgtagtaacgccgcgccagttcagcaatcccctttaactgggcaaatttcgccacgccaattccatgaacgccactaaattgttcatattcagaggttaacaagccataaagagagccgaaattctccagcatctcttttgccagggttaatacatctttaccgcgcgttccggtacgcagaaatagcgccagcagctcgacatccgttaaggcgctaataccaaacttcagcattttttcgcgcggcatcaacagctgactattgtttttcaccttcacctcctttgtggtgctcgcatcctgtcatagccgtttcgttaaatcgacggccagttttcaatcctggaaagcgcctcgcaaagtgaatctcaggtgaaggcacgacaacaaaagtattgtgataaaatcgccaacttctggtgtcaccctacaggaaaaatcatcatgagcctggccggtaaaaaaatcgttctcggcgttagcggcggtattgctgcctataaaacccctgaactggtgcgtcgtttgcgcgatcgcggggccgacgtccgcgtagccatgaccgaagcggcaaaagcctttatcaccccacttagcttgcaggcggtttctggttatcccgtttccgacagtctgctggacccggcagccgaagccgctatgggccatattgagctgggtaaatgggctgatttagtgattctcgcccctgccacggcagatttgattgcccgtgttgctgccggaatggcgaatgacctggtaagcacgatttgtctggctacacctgcgcctgtagccgtgctccccgccatgaaccagcagatgtaccgtgccgctgccacgcagcataatttagaggtgcttgcttcccgtggtttgctcatctgggggccagacagtggcagtcaggcttgtggtgatatcggtcctgggcgaatgctcgatccgttaaccattgtggatatggcggtagcgcattttagccccgtcaacgacctgaaacatctgaacattatgattaccgccggcccgacgcgtgaaccgctcgatccggtgcgttatatctctaatcacagctccggcaagatgggttttgctatcgccgccgccgctgcccgtcgtggcgcgaacgtcacgctggtaagtggtccggttagtctaccgacgccaccgtttgttaaacgtgttgatgtgatgaccgcgctggaaatggaagccgccgtgaatgcttctgtacagcagcaaaatatttttatcggctgcgccgccgtggcggattatcgcgcagctaccgtggccccagagaaaatcaaaaagcaggccacgcagggtgatgaattaacaataaaaatggttaaaaaccccgatatcgtcgcaggcgttgccgcactaaaagaccatcgaccctacgtcgttggatttgccgccgaaacaaataatgtggaagaatacgcccggcaaaaacgtatccgtaaaaaccttgatctgatctgcgcgaacgatgtttcccagccaactcaaggatttaacagcgacaacaacgcattacaccttttctggcaggacggagataaagtcttaccgcttgagcgcaaagagctccttggccaattattactcgacgagatcgtgacccgttatgatgaaaaaaatcgacgttaagattctggacccgcgcgttgggaaggaatttccgctcccgacttatgccacctctggctctgccggacttgacctgcgtgcctgtctcaacgacgccgtagaactggctccgggtgacactacgctggttccgaccgggctggcgattcatattgccgatcctagtctggcggcaatgatgctgccgcgctccggattgggacataagcacggtatcgtgcttggtaacctggtaggattgatcgattctgactatcagggccagttgatgatttccgtgtggaaccgtggtcaggacagcttcaccattcaacctggcgaacgcatcgcccagatgatttttgttccggtagtacaggctgaatttaatctggtggaagatttcgacgccaccgaccgcggtgaaggcggctttggtcactctggtcgtcagtaacacatacgcatccgaataacgtcataacatagccgcaaacatttcgtttgcggtcatagcgtgggtgccgcctggcaagtgcttattttcaggggtattttgtaacatggcagaaaaacaaactgcgaaaaggaaccgtcgcgaggaaatacttcagtctctggcgctgatgctggaatccagcgatggaagccaacgtatcacgacggcaaaactggccgcctctgtcggcgtttccgaagcggcactgtatcgccacttccccagtaagacccgcatgttcgatagcctgattgagtttatcgaagatagcctgattactcgcatcaacctgattctgaaagatgagaaagacaccacagcgcgcctgcgtctgattgtgttgctgcttctcggttttggtgagcgtaatcctggcctgacccgcatcctcactggtcatgcgctaatgtttgaacaggatcgcctgcaagggcgcatcaaccagctgttcgagcgtattgaagcgcagctgcgccaggtattgcgtgaaaagagaatgcgtgagggtgaaggttacaccaccgatgaaaccctgctggcaagccagatcctggccttctgtgaaggtatgctgagtcgttttgtccgcagcgaatttaaataccgcccgacggatgattttgacgcccgctggccgctaattgcggcacagttgcagtaatatgacgccggatgacttttcatccggcgagtttctttaaacgccaaactcttcgcgataggccttaaccgccgccagatgttccgccatttccggcttctcttccaggtaagcaatcaggtctttcagggtgatgatagagatcactttgcagttgtaatcacgctcaacttcctgaatcgcgctaatctcgccgcgcccgcgttcctgacgatcgaggctaatcaacacgccagcaagcgtcgcgccattggcctgaataatctccatgctctcgcgaatcgccgttccggcggtgatcacatcatctaccagcattacgcgtccttgtaacgcgctaccaaccagattgccgccttcaccgtggtcttttgcttctttgcggttaaagcagtacggcaggtccaggtcgtgatgctccgccagtgccacagcggttgtggtggcaatcgggatccctttgtaagcagggccaaacagcagatcgaactcaatgccggaatccaccaacgcttcagcgtaaaaacggcctaacagtgccagatcgcgcccggtattaaacagcccggcgttgaagaaataggggcttttgcgcccggatttcagcgtaaactcgccaaactttaacacctgcttgctaagcgcaaattcaataaactggcgctgatatggtttcatgccttcgctcctcatcttacttttctacagacaaaaaaaaggcgactcatcagtcgccttaaaaatcagtttgccagcgccgccttctgcgtcgttacaatggattgctttcccctcgggccagagccaacaagatgagtagctcttcatgggtgaacggctcgccttctgccgtcccctgcacttcaatgatgcgcccgtcttcggtcatcactacgttcatgtcggtctctgcggcagagtcttcaacgtattccagatcgcaaaccgcttcgccgttcacaattccgacagaaactgcggctaccatccctttcatcggattggttttcagcttgccgttttccaccagcttctgtagcgcatctaccagcgccacgcaggcacccgtaatgctcgcggtacgcgtgccaccatcagcctgaagcacgtcgcagtccagcgtaatggtgaactcacccagcgctttcaaatctactgccgcgcgaagagcacgggcgatcagacgctggatttccattgtgcgtccaccctgcttacctttcgccgcttcacgagcgttacgggtgtgggtagaacgtggcagcatgccgtactctgcggtgatccagccctggccctgacctttcaggaagcgcggcacgccttcttcaatagaggcggtacacaacactttggtatcgccaaattcgaccagcacgctgccttctgcatgttttgtatagttacgagtcagggtaacgggacgcacctgattattgctacggcctgctggacgcatattgaaatctccggcttgaaacaaatgtggctgcgcattatacggacttccggcggttattcctatcctgacaaggcatcgatggctataatccttccacctctccttttataaacaggaacgtctatgatccgcagtatgaccgcctacgcccggcgtgaaatcaagggtgaatgggggagcgcaacctgggaaatgcgcagcgtaaaccagcgttatctggaaacttactttcgtctgccggagcagttccgtagccttgaacctgtcgttcgcgagcgtattcgttctcgcctgacgcgcggtaaagtggaatgtaccctgcgctatgagccagatgttagcgcgcaaggtgagctgatcctcaacgaaaaactggctaaacagctggtaactgccgcgaactgggtaaaaatgcagagtgacgaaggggaaatcaacccggttgatattctacgctggccgggcgtgatggcagcccaggagcaggatcttgacgccattgccgctgaaattctcgcggcgctggatggtacgctggacgactttattgtcgcgcgcgaaaccgaaggtcaggcactgaaagcattgatcgagcagcgtctggaaggcgtcaccgccgaagtggtcaaagtccgctcccatatgccggaaatcctgcaatggcagcgtgagcgtctggtcgcgaagctggaagatgctcaggtgcaactggaaaacaaccgtctggagcaggaactggttctgctggcacaacgaattgacgttgccgaagaactggatcgcctcgaagcgcatgtcaaagagacctacaacattctgaagaaaaaagaagcggttggtcgtcgtctggattttatgatgcaggagttcaaccgcgagagcaacactcttgcgagcaagtctatcaatgccgaagtgacaaactccgccatcgagctgaaagtgttgattgagcagatgcgcgagcagattcagaacatcgaataactcgtaacgccaattcttacttttccgccttcacaaatgccgccactcaaacagagcggcatttttcttccccgcaacattcaattctgttttgcgtgcctgctccagattttgcgatgtttttttgcccagcacactgagaacgtgagatactcacaactgtatataaatacagttacagatttactttctttgcaattgatatcacatggagtgggcaatgaacgaacatcatcaaccttttgaagagataaaactgattaatgcaaacggagcagaacaatggagtgcaagacaacttgggaaactactgggttatagtgagtatcgtcactttatacctgtattaacgcgcgccaaagaagcctgtgagaacagtggtcacacaattgatgaccatttcgaggagatcctcgatatggtcaaaattggcagtaatgccaaaagagcattaaaagacatcgtactctcccgctatgcctgttacctggtagtacaaaacggcgaccctgcgaaaccggtcattgcggcagggcagacttattttgctatccagacccgacggcaggagcttgctgacgatgaagcatttaagcaacttcgtgaagacgaaaagcgtctgtttctgagaaatgagttgaaagaacataacaaacaattggttgaggcagcacagcaagctggggtagcgacagctactgatttcgccatatttcagaatcatggttaccaggggctgtatggtggattagatcagaaagctattcatcagcggaaggggctgaaaaagaatcagaagatcctggatcatatgggtagtacagaactggcggctaatctctttcgagctacccaaacagaagaaaaactcaagcgggatggcgtgaatagtaaacagcaagcaaacaccacacactttgacgtgggtcgcaaggtgaggcaaaccattcaggaacttggcggaaccatgcctgaggagttgccgaccccgcaggtcagcatcaagcagttggaaaacagtgtaaaaattacagagaagaaataacagaaactaaaaactctttttgttgattgagacacccgatgcgtaagccaaggtccaggtgcagtgaacacaatggctaaatattgcacctttcttttccccctcagttttaacctattttttcttatgcattttctcagacaagaagtcagaagaatgcatctctgctacagaaaatagcgatttcacataactacaagttatcaatttcccctccccttaaaaaatctcaatcgtgacaatgcgcacaaatcgctaccctgccagacagatttttagggagagaaccatgctgttacacattttgtatttggttggcattactgccgaagccatgacgggggcgctggcggccggacgacggcgcatggatacatttggcgtaattattattgcgaccgccaccgcaattggcggagggagtgtgcgcgatattctgctgggccactatccgctcggctgggtcaaacacccggaatatgtgattatcgtcgctaccgccgcagtactcaccactatcgttgctcctgtaatgccttacctgcgcaaagtgtttctggtgctcgatgcgctcggactggtggtcttttctatcatcggggcacaggttgcactggatatggggcacggcccaattattgccgttgtcgcggcggtaaccaccggcgtgtttggcggcgttttgcgcgatatgttctgtaaacgtatcccactggtattccagaaagagttgtatgccggtgtcagttttgcctccgccgtgctgtacatcgcgctgcaacactatgtttctaaccatgatgtggtaattatctccaccctggtattcggcttttttgcccgcttactggcgctacgccttaagctgggattaccggtcttttactacagccacgaaggacattaaggttcaaaacctgtgatctgctgggcagccagccaactgcccagcttcttgatttgcgcattttccttccattcaataacctgtctggcgcgtccgcttccagtccccggcagctgctgccagaactgctccgtgctaaataaaagttggctccaggaccgttcatcactggcattaagcgccgcccgggttagcggtattcccattgccatcacccagcgagtaaaaggctgcttacgagccagattaaactgatgccatagctgcgcacttttacttttcgcgatccccggcgtgttctgtaattgctctggcgttaataaaagccaggaaaagatatgttcaaagcgatgagtctgatgcagcgcgcgccaaccggcctcaccaatgccatccagcccaagaacctgttttgcccccagccagactaagcgactaatgaactgttcctgacaaacatcagaagcaaagtagcaggtcaagctgttaaagcggttttctggcggtgtcggttttgtacgttctgcaccgcgccacaccacatcatcaatgcgaggaataccctgaccggcaaggctgacgagaatctgatcaccaggcgcaatatcccactcctgccagcgcctgacggaaccaatattcacccgctggacttttttatcatccagcatgacaggtgcgagactcgcaaccacgcttattttaccgctcttacccaccgcaaactgaattgccttcacttcggcaacctgagctacaggttgatatttccaggccaccagccactctgcctggcccggtagccaatggcgggattctggctctttcgccgctcgtacaactacgccatcggtgacgaagggtaattccgctttccaccactcattgcgtacgcgcgcaacttcatcagcatttttcaccgcacgggtatacgtctgcgttagagtaaaacctgcggtagccagctcttttaaacgatcagacattaactgcggtccatccggccatgcccagacaaaaacgcccagagaattcagcgtgtcgctatcgtcctggcgcatcatcaagccagcaacttttgcgcgggcatttattccccccatttgttgttggatatgcccctcgcgctggagaaatatttccccctgaagcgtactgttggctaaaggcccgctaacggtttgcggcacagcggaaattaagctaactttctgcgtccagtcctcgcctttcaggccattaccgcgactgattgctttgttcagtttcccgtcccgataaaccagggttaccgcaacgccatcaacttttggctgcacccaaagatcgctacgttctcgcatccacagacttaatgcgtttttatccaccattttgcgtacacccgtatgggcaaccggatgcataaccgcaccatttaaaggcggcatcatcacgtcgcggggctcgctcccaaagcagcgttgccactgcgtaagacgggcgcttaactgatcgtaaacaccgtcttccacctcactttttccttccttccagtagtcatcgtcccactgttttatttgctgttgcaggcgggaaatttcttcctgtgctctggctgggctccaggccggacagaccgcccacacagaactttgccagcacaagatacctattaatatcgccatccatactttcatcatcacctccgctgtagatagtcaggcagatatacaacgtgatgaaagcaaagccgagtggcaaaaacggagtctgcgaggacgcttcctgaaaatcgtctttattgcagtgaatgacaggcaaatgcggaagcagctacgcaaaacgcaacaactttgcgcaaaaagtgtgagcaagggctacgtcacatggccgcgccgtgtataataagctcgtatgtaggctttatttcgctaatcacatacgaaagatactcatggctcaaggcacgctttatattgtttccgcccccagtggcgcgggtaaatccagcctgattcaggctttattaaaaacccaaccgttgtgtgacacccaggtttctgttagtcacaccacacgccaaccgcgtcctggtgaagtccacggtgaacattatttctttgttaatcatgatgaatttaaagaaatgattagcagagatgcgttcctcgaacacgcagaagtttttggtaattactatggcactagccgtgaggccattgagcaagtactggcgaccggtgtcgatgtttttctcgatatcgactggcagggcgcgcagcaaattcgccagaagatgccgcacgcgcggagtatctttattttaccgccgtccaaaattgaactggaccgccgtctacgcggtcgcggtcaggacagcgaagaggtcattgcaaagcgtatggcgcaagctgttgcagaaatgagccattacgccgaatatgattatctgattgtgaatgatgacttcgataccgcgttgaccgatttgaagaccattattcgcgccgaacgtctgcgcatgagccgccaaaagcagcgtcatgacgctttaatcagcaaattgttggcagactgaacctgatttcagtatcatgcccagtcatttcttcacctgtggagctttttaagtatggcacgcgtaactgttcaggacgctgtagagaaaattggtaaccgttttgacctggtactggtcgccgcgcgtcgcgctcgtcagatgcaggtaggcggaaaggatccgctggtaccggaagaaaacgataaaaccactgtaatcgcgctgcgcgaaatcgaagaaggtctgatcaacaaccagatcctcgacgttcgcgaacgccaggaacagcaagagcaggaagccgctgaattacaagccgttaccgctattgctgaaggtcgtcgttaatcacaaagcgggtcgcccttgtatctgtttgaaagcctgaatcaactgattcaaacctacctgccggaagaccaaatcaagcgtctgcggcaggcgtatctcgttgcacgtgatgctcacgaggggcaaacacgtagtagcggtgaaccctatatcacgcacccggtagcggttgcctgcattctggccgagatgaaactcgactatgaaacgctgatggcggcgctgctgcatgacgtgattgaagatactcccgccacctaccaggatatggaacagctttttggtaaaagcgtcgccgagctggtagagggggtgagcaaacttgataaactcaagttccgcgataagaaagaggcgcaggccgaaaactttcgcaagatgattatggcgatggtgcaggatatccgcgtcatcctcatcaaacttgccgaccgtacccacaacatgcgcacgctgggcagtcttcgcccggacaaacgtcgccgcatcgcccgtgaaactctcgaaatttatagcccgctggcgcaccgtttaggtatccaccacattaaaaccgaactcgaagagctgggttttgaggcgctgtatcccaaccgttatcgcgtaatcaaagaagtggtgaaagccgcgcgcggcaaccgtaaagagatgatccagaagattctttctgaaatcgaagggcgtttgcaggaagcgggaataccgtgccgcgtcagtggtcgcgagaagcatctttatagcatttactgcaaaatggtgctcaaagagcagcgttttcacagcatcatggacatctacgctttccgcgtgatcgtcaatgattctgacacctgttatcgcgtgctgggccagatgcacagcctgtacaagccgcgtccgggccgcgtgaaagactatatcgccattccaaaagcgaacggctatcagtctttgcacaccagcatgatcggcccgcacggtgtgccggttgaggtccagatccgtaccgaagatatggaccagatggcggagatgggtgttgccgcgcactgggcttataaagagcacggcgaaaccagtactaccgcacaaatccgcgcccagcgctggatgcaaagcctgctggagctgcaacagagcgccggtagtagctttgaatttatcgagagcgttaaatccgatctcttcccggatgagatttacgttttcacaccggaagggcgcattgtcgagctgcctgccggtgcaacgcccgtcgacttcgcttatgcagtgcataccgatatcggtcatgcctgcgtgggcgcacgcgttgaccgccagccttacccgctgagccagccgcttaccagcggtcaaaccgttgaaatcattaccgctccgggcgctcgcccgaatgccgcttggctgaactttgtcgttagcagcaaagcgcgcgccaaaattcgtcagttgctgaaaaacctcaagcgtgatgattctgtaagcctgggccgtcgtctgctcaaccatgctttgggtggtagccgtaagctgaatgaaatcccgcaggaaaatattcagcgcgagctggatcgcatgaagctggcaacgcttgacgatctgctggcagaaatcggacttggtaacgcaatgagcgtggtggtcgcgaaaaatctgcaacatggggacgcctccattccaccggcaacccaaagccacggacatctgcccattaaaggtgccgatggcgtgctgatcacctttgcgaaatgctgccgccctattcctggcgacccgattatcgcccacgtcagccccggtaaaggtctggtgatccaccatgaatcctgccgtaatatccgtggctaccagaaagagccagagaagtttatggctgtggaatgggataaagagacggcgcaggagttcatcaccgaaatcaaggtggagatgttcaatcatcagggtgcgctggcaaacctgacggcggcaattaacaccacgactagcaatattcaaagtttgaatacggaagagaaagatggtcgcgtctacagcgcctttattcgtctgaccgctcgtgaccgtgtgcatctggcgaatatcatgcgcaaaatccgcgtgatgccagacgtgattaaagtcacccgaaaccgaaattaatgttttatgaacccaacacgttatgcacgcatctgcgaaatgctcgccaggcggcagcctgatctgaccgtctgcatggagcaggtccacaaacctcataacgtttctgcgattattcgtaccgcagatgccgttggcgtacatgaagttcacgccgtctggcctggtagccgcatgcgcaccatggctagcgcagcggcgggtagtaacagctgggtacaggtgaaaacacaccgcaccattggcgatgccgtcgctcatctcaaaggccagggcatgcagattctggcaacccatctttctgataacgctgtcgatttccgcgaaattgattacactcgcccgacctgcattttgatgggacaggagaaaacgggcatcacgcaggaagcattggccctggcggatcaggacatcatcattccgatgatcggcatggtgcagagcctgaatgtttccgttgccagtgccctcattctttacgaagcccagcgtcagcggcaaaatgcaggcatgtacctgcgtgaaaacagcatgttgccggaagcagagcaacaacgcctgttgtttgaaggcggctatccggtgctggcgaaagtcgcaaaacgcaaaggcctgccttatccccacgtcaatcagcaaggcgagatcgaagctgatgccgactggtgggctactatgcaggctgcagggtaagtgccatgaaaggtcgcctgttagatgctgtcccactcagttccctaacgggcgttggcgcagcacttagtaacaaactggcgaaaatcaacctgcataccgtgcaggatctactcttacaccttcccctgcgctacgaagatcgcacccatctctaccccatcggagaactactgccgggcgtttatgccacggtggaaggcgaagtgctgaactgcaatatctccttcggcggtcggcggatgatgacctgccagatcagcgacggttccggcatcctcaccatgcgctttttcaatttcagcgcggcaatgaaaaatagcctggcggcgggccgccgtgtactggcttatggcgaagcaaagcgcggtaaatatggtgcggagatgatccacccggaataccgcgtgcagggcgatctcagcacgccagaattacaggaaacgctcacgccggtttatccaacaacggaaggcgtaaagcaggccacgctgcgtaaattaaccgaccaggcgctggatctgctcgacacctgcgccattgaagaactcctgccgccggaactgagtcaaggaatgatgacgctaccggaagcgttgcgcactttgcaccgcccgccaccgacgctacagcttagcgatctggaaaccgggcagcatccggcgcaacgtcgtctgattctggaagaactgctggcgcacaacctcagcatgttagccttacgtgccggagcacagcgttttcatgcccagccgctgagcgccaatgacacgctgaaaaataaactcctcgccgccttaccgttcaagccaacgggcgcacaggcacgcgtagtggcggagatcgagcgcgatatggcgctggatgtgccgatgatgcgtctggtgcagggcgatgtaggttccggtaaaacgctggtcgccgccctcgccgcgttgcgtgcgattgcccacggcaaacaggtagcattgatggcaccaaccgaattactcgccgagcagcacgccaataacttccgcaactggtttgcaccgctcggtatcgaagtgggctggctcgccggtaagcagaaaggtaaagcacggctggcacagcaggaagccatcgccagcggtcaggtgcagatgattgtcggtacacacgccatcttccaggaacaggtgcagtttaacggcctggcgctggtgattatcgacgaacagcatcgttttggcgtgcatcagcgtctggcattgtgggagaaaggccagcagcagggcttccatccgcatcagttgatcatgaccgccacgccgatcccccgcacgctggcaatgactgcgtatgccgatctcgataccagcgtgatagatgagctgccgccaggccgcacgccagtgactacggtcgctattcctgatacccgccgtaccgacatcattgaccgcgtgcaccacgcctgcataactgaaggtcgtcaggcatactgggtttgtacgttgattgaagagagcgaattgctggaagcgcaggcggcggaagctacctgggaagagttgaaactggcgctaccagagttgaacgttggcctggtacacgggcggatgaaacctgccgagaaacaggcggtgatggcgagctttaaacaaggtgagctacacctgctggttgccacaaccgttattgaagtcggcgttgatgtgcctaacgccagtctgatgattatcgaaaacccggagcgtctgggtctggcgcagttacaccagctgcgcgggcgcgtaggtcgtggcgcggtggcttctcactgcgtgctgctctacaaaacgccgctttctaaaacggcgcaaattcgcctgcaagtgctgcgcgacagtaacgacggttttgtgattgcgcaaaaagatctggagattcgcggccctggcgaattgttaggcacgcgtcagacgggtaatgctgaatttaaagtggcggatttactgcgcgatcaggcgatgatcccggaagttcagcgcctggcacgccatattcacgaacgttacccacaacaggcaaaagccctgatagaacgctggatgccggagacggaacgttacagcaatgcgtaaaaggcggcagtgagaagaccgccatttcaggttaccctaccttcctgccggatgcgattcatcaccctacaaattcaataaattatgaatcaatacgcaggcttgataagcgaagcgtatcaggcatttgtctttgttgcggcggcacttctaccgccgcttcatcggttaaccggcaaaaatcggcaacatcaaatacaacttaattaccagcgcattgacgatatcgataaagaacgcaccgaccatcggcaccaccaaaaacgccatgtggcccgggccaaagcgttcagtgatcgcctgcatgttggcgattgccgttggcgttgcaccgaggccaaaaccacagtgacccgcagccagcactgccgcatcgtagtttttgcccatcatgcgccaggtaacgaagatggcatacaacgccatgaagatggtctgtaccaccagaatcgccagcatcggcagcgccaggctagccagctcccacagtttcagccccatcaacgccatcgccaggaacaagctcaagcttacgttacccagcacggataccgcacgctcaaagacgcggtaaaagcccattatactcagaccgttgctcagaatcacgccaacaaacagtacacagacgaaggtcggcagttcaaaagcagtgccagccaaaagttgcgcaacaattttccccaccgtcaggcagatagcaatcagcgcgatagtttcaatcagcaccaagctggtgatcatgcgtcccacatccggcttttcaaacgccgtcgggacttcctggtcatccggaataccgttcggcgtggtggagtgtttcaccagatagcgcgccaccggaccgccaatcaagccgcccagcaccagaccgaacgttgcacaggccatcgccacttccgtcgcattggtgaagccataacgttcaatgaacaatttactccacgcagcgcccgtaccgtgaccgccggaaagagtaatagaaccggccaacagccccatcagcggatcaagccctaacaagctagccataccaatgccaatggcattttgcatcaccaacagaccaacaaccacaatcaagaagatgccaaccacacgcccaccggcacgcaaactggcaatgttggcgttcaggccaatggtggcgaagaaagccagcattaacggatcgcgcagggacatatcaaagttgacttcccagcccatgctttttttcagtactagtagcgccagcgccaccaacaaaccacccgcaacaggttccggtatggtgtatttcttcaaaaaggagacggaatggaccaacttacgcccgagcagcaacgtcagcgttgcggcaacaagcgttgctaaagtatcgagatgaaacatagttactcctttgtatccgcatcactctttcatactcgtcatacttcatcgcgcagtggcaacttcatgaactatgacgggtatcgagttatgctttcctgggtcaaattctcagctgttaatgaacaaatggcatggattttaagcagaaaaataccaaaagttatataaaaaagtgcatttatctcatttaaatatttagatgaggatgtggcaaacgtttgcttttctctttcggtcagctaaaatgcccgctttgctaccacgggattgttttcgatgtctgtttccaccctcgagagtgaaaatgcgcaaccggttgcgcagactcaaaacagcgaactgatttaccgtcttgaagatcgtccgccgcttcctcaaaccctgtttgccgcctgtcagcatctgctggcgatgttcgttgcggtgatcacgccagcgctattaatctgccaggcgctgggtttaccggcacaagacacgcaacacattattagtatgagcctgtttgcctccggtgtggcaagcattattcaaattaaggcctggggtccggttggctccgggctgttgtctattcagggcaccagcttcaactttgttgccccgctgattatgggcggtaccgcgctgaaaaccggtggtgctgatgttcctaccatgatggcggctttgttcggcacgttgatgctggcaagttgcaccgagatggtgatctcccgcgttctgcatctggcgcgccgcattattacgccgctggtttctggcgttgtggtgatgattatcggcctgagcctaattcaggttgggttaacgtccattggcggcggttacgcagccatgagcgataacaccttcggcgcaccgaaaaatctgctgctggcaggcgtggtcttagccttaattatcctgcttaaccgtcaacgtaacccttacttacgcgtggccagtctggtaattgcgatggcggccggatatgcgctggcgtggtttatgggcatgttgccagaaagcaacgaacctatgacgcaagaactgattatggtgccaacgccgctctattacggtcttggcattgaatggagtctgctgctgccgctgatgctggtctttatgatcactagcctggaaaccattggcgatatcacggcgacctctgacgtttccgaacagccagtgtccggtccgctgtacatgaaacgcctgaaaggcggcgtgctggcaaacggcctgaacagctttgttagcgcggtgtttaacaccttcccgaactcctgcttcgggcaaaacaacggagtgatccagttgactggtgttgccagccgctatgtcggttttgtcgtcgcgctgatgttgatcgtgctgggtctgttcccggcagtgagcggttttgtacaacacattccagaaccggttctgggcggcgcaacgcttgtaatgtttggcaccatcgccgcctccggtgtgcgtatcgtttctcgtgagccgctgaaccgtcgggcgattctgattatcgcgctgagcctggcggttggtctgggcgtgtctcagcagccgctgattttgcagtttgcccctgaatggctgaaaaacctgctctcctccgggatcgccgcgggcggtattactgccatcgtgctgaatctgattttcccaccagaaaaacagtaattcactggcggcggtaagataattaccgccgcagtctcacctctttaaccattcccgccttgaggattgcgcgtaaatcgtgcataactcccttatgtgcatttcacgggatggaagaccatgaaatttattgggaagctgcttctctacattctcatcgctctgttagtggcgatcgctggcctctattttcttctgcaaacccgctggggagcagaacatatcagcgcatgggtttccgagaatagcgactatcatctggccttcggggcgatggatcaccgtttttccgcgccatctcatatcgtgctggagaacgtcacgtttggtcgtgatggccagcccgcgaccctggtggccaaaagtgtcgacattgcgctaagcagtcggcaactgaccgaaccacgccatgtcgataccatcctgctggaaaacgggacgctgaatctcaccgaccagaccgcgccgctaccgttcaaagccgatcgtctgcaactgcgtgatatggcgtttaatagcccgaatagcgaatggaaactgagcgcgcagcgggtaaatggcggcgtagttccgtggagtccaaaagccggtaaagtgctgggtacgaaggcgcagattcagtttagtgccggaagccttagcctcaatgatgttcctgccaccaatgtactgattgaaggcagtattgataacgatcgcgttacgctgactaacctgggtgccgacatcgcccgcgggacattaaccggaaacgcgcagcgtaacgccgacggcagctggcaagtggaaaacctgcgcatggcggatatacgtctacaaagcgaaaaaagcctaaccgacttctttgcgccattacgctctgtcccgagcttgcagattggtcgcctggaagtgatcgatgctcgtttgcaaggtccggactgggcggtgaccgacctcgatctcagcttgcgcaacatgaccttcagtaaagatgactggcagacacaggaaggcaaactgagcatgaacgctagcgagttcatttatggtagcctgcatttatttgacccgattataaacacggaattttccccgcagggcgtagcgctgcgccagttcaccagccgctgggaagggggtatggtcagaacgagtgggaactggctgcgtgacgggaaaacgttgatccttgatgatgcggcaattgccgggctggaatataccttgccgaaaaactggcaacagttgtggatggaaacgacacccggttggttaaacagcctgcaactgaagagatttagcgccagccgcaatctgatcattgatatcgaccctgacttcccgtggcagctcaccgcgctcgatggttacggtgccaacctgacgctggttaccgatcataaatggggcgtctggagtggcagcgcgaatctgaatgccgccgccgcgacattcaatcgtgttgatgttcgtcgcccgagcctggcgctgaccgccaacagcagcacggtgaatatcagcgaactgagtgcatttactgaaaaaggcattctggaagccaccgccagtgttagtcaaacgccacaacgtcagacacatatcagcctgaatggacgcggtgtgccggtgaatattttgcaacagtggggatggcctgaattaccgttgactggcgacggcaatattcagcttaccgccagtggcgatattcaggccaatgtcccgttgaaacctacggttagcgggcaattgcatgccgtgaacgccgcaaagcagcaagtgactcaaaccatgaatgctggcatcgtttccagcggtgaagttacaagcacggagccggtgcggtaaacatcaatctcgccgggtacgactcagacgtacccggcattccatcaatagattacaacgtaattgtcagcgcattcccttgaggcttcaccaccagcccctgctcactttcagcctggctaccgtcttgcagaccatttactttcacaacattgcgcaggcacagtgtccagttcttcgcctcgcccgcaccagtcacagtaatcgtgttgccagtacgtgctgcttttaaagtaaagatcacgcttccgtcagcagcgggcacttcacagacggcttcatgcccgtcttgcagattgaagaggtggaatgccgtgccttcgtgccacacgtaatcgggacgttgatcgttgttgcccagcgccagtagagtgttatcacgcacataaacgggcagactcaggaagccgtgctgctgtttatgccagcgactaccgtcgagttcatcgttgtgccacaggtgtgtccagcgaccttccggcaggtagaactgcacatcgcccgcttcagtgaacaccggcgcaaccatcacgttgtcgcctaacatgtattgacggtcaaggtaatcacaagccggatcgtccgggaactccatcatcatggcccgcatcatcggcgtaccccgcgcgttcgcacgcgcagcttcacgatacagatacggcatcatgcggcatttcagttgcgtgaagaagcgcaccacatcacaggactcatcatcgtaggcccacggcacacgataagatttgctaccgtgtaaacggctatggctggagagcaaaccaaacgcgcaccagcgtttgtaaacgtgcgccggagcggtattttcaaagccgccgatatcgtggctccagaagccaaaaccactaaggccaatagacaaaccaccgcgcaggctttccgccatactttcgtagttagcgtaacaatcgccaccccagtgtaccgggaatttctgcgcaccgacggaggcgctgcgggcaaacaagacagcttcttcctcaccaacggtgtccttgagcacgttccacaccagttcgttgtagatgtacgcataatggttatgcattttctgcggatcggaaccgtcaaaccactgaacatcagttgggatacgttcgccaaagtcggtcttaaagcaatcaacgcccatcgcgaccagacctttcagtttgtcggcgtaccatttgcaggcatccggattggtaaagtcataaatcgccagacctggctgccatttatcccactgccataggctaccgtccgggcgtttgagtaaatagcctttctcttgtaactctttaaagacgggggatttttgaccgatataggggttaatccagacgcagattttcagtcctttcgctttcaggcggcggatcatcccttccgggtcagggaaagtcagcgggtcccactcaaaatcgcaccactggaaggctttcatccagaaacagtcaaagtggaaaacatgcagcggcagattgcgttccgccataccatcgataaagctgtttaccgtcgcttcgtcgtagttggtggtaaaactagtggttagccacaggccgaaggaccacgcgggcggcagcgccggacgaccagtaaagcgggtataacgatcaagtaccgctttcggcgtcgggccgtcgataacaaagtattcgagatattcactctcaacgctgaactgcactttggagactttctcgcttcccacttcaaaagagacacactggggatgattgaccagtaccccataaccacggttagtcatgtagaacgggatatttttatacgcctgttcagtacttgtgccgccgtcccggttccaggtctctaccgtctggccattgcgcaccagggcagtaaagcgctctcccagaccgtaaactgtttcgccaacgccaagatcaagccgctcaaacatataattgcgttgattattcgtgtcctgcacgtagccattatttttcacctgactaccggtaatacgttcgccgttgcgcagaaaatccagactccagaactcacctttgctgacacgcgcgcttaagttgccacttttaaactcagcataacgttctgtgttttcgattgtgaccttcacgtcctgcaaaatattgagcggataatgaggaccgttattcagcgccccctgaaaatgctcaatccgcacaccgacaataccttcctgtggggagaaaaagcgcaacgtaaataaaggcgtatcaagctgccaggtacgttcacgcacatcacggggggcagcatagaccaccatttcattatcctgctgttcaacctcgaacacctgaagcgggtgaatcaaattgaggccaggttgaatcaaccagtttccatcgctaattttcattgccgttccttagttctgcacttcttgagaggtgaattgttgctggcaacggcgtttaccctgagccagctgttccataacggttttcagattgtgcgtcgtgagactgtagtagcgtttagcgataatcgcgctcagcaaataacagatcgccggaacaatcgtgaatagcgcaataatgatgctaatcgtggcgctgttctgcgctttttctgccgcatcatatccgccataagccagcatccagccgataagagcgccgccgaaggccaaccccagtttgagcacaaacagcgtgccagcaaaactgatcccggtcaggcgtttaccattgcaccactcgccgtagtcgacggtatcggacatcattacccactggataggtgtcaccagttgatgcaacacaccaatcacgaagatgaagacaaacatagtgatgctggcctgcatgggaacaaagaacatcgcgaggctaatcactgccagcagggcgttcgtccaccagaagatagtgactttacatttccagtcggtcagaggttttgccagtgcggaaccaatcaggttacccacgcaataagtggtgagaaaagcgacaaacacttccggcgtgcccaaaatccatgtgacgtaatacatcatcgccccaccgcgtacgcacaccgccaggatattgaaaatggttagtaaaccgacaatccgccactggtcgttttgccagatatcacgtaaatcttcccgcatagacgttgttgtaggtggtgcttcaacgcgttctttagtggtgaagaaacaaaatgccagcatcatgaatgccaccacggaaaggaccgcgataccgccctggaaaccgagtggtttattatcaccgccaattaaattaaccagtggcatcatcagaacagtagaaagcatgcctcccgcggtcgccagcacaaaacgccaggattgcaggctgatacgctgagtcgggtcattggtgattacaccacccaatgcgcagtaagggatattgacgacggtataaagtaaggtaagtagggtgtaagtaattgctgcatagatcattttgccgttcatactgagatctggcgtgctataggccagtacacagacgatcccgaatggcagtgcgccaaacagtacccacggacgaaatttaccccagcgagagcgcgttcgatcggccaacaaccccatgcaaggatcggaaatcgcatccagtgcacgagcgaccaaaaacatggttccgacaaaaccggcaggaatgccaaaaatatcggtataaaagaacatcatatataacattacgttatcgaaaataatgtggctggcggcgtctcccatgccataaccaattttctctttaacggacaacacttcactcttcatctgcttttccttgatgctataggggtgctgagaccgataacgcattttgtaaaccatccctgtgagagcgaatattccgatatctggttattaatttatgattcttgttttatgtgatcgtggtagcgttaattccgctcatatatcattgtaaaatatgggttttatatgaactataatgctttcgtgataatacgctgcgtgtattaggcggaaaaaactgatctgggggatgtagaaactcaaggaagtagctataatgcgccccgcctccatgtagcaatcgaggcgcggaagatcgtcgtctccggtgaggcggctggacttcaaatccagttggggccgccagcggtcccgggcaggttcgactcctgtgatcttccgccaaaatgcctctcctgacgttctccaaccccttgtaatactgtcaatccagatattttctactgctcaatattcaatcggcttcaggaatacctggtctaaggttttgtgatggacgatgagcggctgaagaatccgcctgtcggttcttctgtcctcgaacgcatccgcgatattcacgccagtatgcgccgtgtttatttgcaggtgatttgcccccctgctgactctcagccaactgtatcgccattaaggtgaagatgttgttttactcgccccagaacacccttttttatacgactattctatttctttaaccgctggcgaaaaaaactgactataaacttcaccaataatcagactgccatcaagattaatttgttcatttaatatatcaaatcaacttgttttatttttactatcaaaaatagctcattgccttactataattaatatataaattcggtaattaattcttaacatgcttttactaataatctcaattgctggccctataatattgcgctagcattgctttctggttgtatcagcgatactcaaaaattcttaatacaatactcattcgactggtacttatttgtaactcagttatattttttcgcccggtgattcagaagaatgcaaaaaacggctaccactccaagtaaaatacttgatctcactgccgcggcatttttacttgtcgcctttctgacgggtattgcgggcgctcttcagactcctaccctaagtatattcctcgcagatgaactgaaagcccgtcctataatggtaggttttttcttcaccggtagcgctattatgggaattctggtcagtcaatttctggcaaggcactccgataaacaaggcgaccgtaaattactgattctgctatgttgcttatttggagtgctggcctgcacgctttttgcgtggaatcgcaactacttcattctcctcagtacgggcgtacttctgagtagttttgcttccaccgcaaacccgcaaatgttcgccctcgcccgtgaacacgccgacagaacaggccgtgagacggtcatgttcagtacatttttacgtgctcagatcagccttgcctgggttatcgggccaccgctcgcttatgaactggcaatgggatttagttttaaagtgatgtatctcaccgctgccatcgcatttgttgtttgcggactgatagtctggttgtttttgccaagtatacaaagaaatattcctgtcgttacccaacccgtagaaattttaccctccacccacaggaagcgggatacgcggctactttttgtggtctgtagtatgatgtgggcggcgaataatctctacatgataaatatgccgctatttattattgatgaactgcatctaaccgataaactgactggagaaatgattggtatcgctgccggtctggaaattccgatgatgttaatcgcaggctattacatgaaacgtattggcaagcgactattaatgctcattgctatcgtgagtggaatgtgtttttacgccagcgtactcatggcgacgactccggcggttgagctggaattgcaaattcttaatgccatcttccttggtattctctgtggtatcggcatgctttattttcaggacttgatgcctgaaaaaataggctctgcgacaacgttatatgcaaatactagtcgcgtcggctggattatcgccggctctgttgacggaattatggttgaaatctggagctaccatgcgttgttctggctggcgatagggatgttgggtattgcgatgatttgcctgctgtttattaaagatatttaactcaccagtctgggctaagaaaaatcggcgtggcgcaaacagagccatcctcgccatttttgctatcatgcctgcatacataaacgacaaaacagtatgcagagggaaaaatgggttccaccagaaaggggatgctgaacgttctgattgccgccgtgttgtggggaagtagtggggtctgcgcgcaatacatcatggagcaaagccagatgagcagccagtttttgactatgacgcgtttgatattcgccggtttgattctactgacgctgagttttgttcatggcgataaaatcttttctattattaacaatcataaagatgccattagcctgctgattttttccgtggttggcgcgctaactgtacagctcacttttttgctaaccatcgaaaaaagcaacgcagccacggcaacggtgctgcaattcctcagtccgacgattatcgtcgcctggttcagtctggtgcgtaaaagccgcccgggcattctggttttctgcgctattttgacaagcctggtcgggacttttttattggtgacacacggtaatccgacgagtttaagcatctctcctgccgcgttgttctggggcattgccagcgcatttgctgctgcattctataccacctatcccagtacgctaattgcccgctatggcacgttaccagtcgtcggctggagtatgctgattggcggtctgattctgttgcctttttatgccagacaaggaacaaactttgtcgttaacggcagtttgattctggcgtttttttatttggtggtcattggtacgtccctgacatttagtctgtacctgaaaggagcacaattaattggcggtccaaaagccagcattttgagctgtgcagaaccattaagtagcgcgctactctctttgctgttgctggggatcacgttcacattaccggactggctgggaacgctgctgattctgagtagcgtgattttgattagtatggattcccgtcgccgcgccagaaaaataaatcgtccggcgcggcataagtgagaattaccagccaggcaccgcgccaccgttaaaaatggtttctgccgctttagcgacttcgggactttgataagattgcagaaattccttcacgttttctgcattcttattatcttcccgtgccaccaaaatattcacatacgggctattcttatcttcaataaatacgctgtcgtgcaccggagaaagcccggtctgctgaatgtaagtggtgctgataatcgctacatcaactttgggatcatccagtacgcgcgggagctgcgccccctcgagttccataatctgcaaatgacgaggattatcggttatatccagcgcggtaggtaataacccttttccctctttcagagtaattagcttctctttttgcaacagtaaaagtgcgcgaccaaggttggtcgggtcgttggggatcgccactgtcgcgccttcttttatttgcgccacggttttgatttttttggaataacccgccatagggaagacaaacgtatttcccaccgctaccagtttataaccatgcgcctgattatcttgttcaagaaagggtcgatgctggaagacattcgcatcaagttcgccatgatttgtcgcatcgttcggtagcaagctaccgctaaatcctaccagttcaacatcgaggccatatttctcttttgccacctttttagcgacttccgcgacatcttgttctgcgccatttataacgccaactttaatgtgttttgcatcgctgctactctggtcgcaacctgccagcagaattccggccagcaataatgcggcccctgtccgtagatgatgtgttgtcagtttcatttttttatccttttattaatgattacctgactatagcggtaaggtcgctgcggtttaaaaaacgaaacgctatcgataagaataaaaaggaataaaagtggaatataaagtctggcacttcttactgaccacgcaagcgcgtttcgtacagcatgatgagagcgatgaaagcaaactacacttatgcttcattcgatacacatttgtaaaaggttgaatccatgaaaccaacgacactactgcttattttcacttttttcgctatgccaggcatcgtatacgccgagagcccttttagcagtctgcagtccgcaaaagagaaaaccacggtattacaagatttacgtaaaatttgcacgccacaggcgagtttaagtgatgaagcgtgggaaaagttaatgttgagtgatgaaaacaataaacaacatatacgcgaggccatcgtggcgatggaacgtaataatcagagcaattattgggaagcgttgggtaaggtagaatgcccggatatgtaagaacagcaacaactactgaccaacgcttctttacctgatatcaggatttcttcattttcacctttgcagtaaccaacaatgcagtcagcaacatcaatgtgccggacaacatcaacgggctagtcagaccaatattatccagcgcataaccgccgattgccgcgccacaggtattagcaagctgaataaccgccacctgaatagacccggctttttctgcctgatcggccaggctgcgggtgatccacgtactccagccgacgggaaccaatgcaaaagttagcccccagataatcgccacgccggtagcaacgattttatcgcttccccacaacgtcagtaccaacgcactcacagccagtattaacggcgcgcctgctaaggccagttttacgctacgtttaagaatgaagctgctaaggctcgtaccaataaagctggcgataccaaaactcaacagcaccagcgttaagccatccacgccgaatcccgccaggttcatatacaccgggcgaatatacgtgaagaaagcaaactgcccggcgaaagacatgaagatggcgatcatccctgccatcacacccggacgttgtaataagcggaaagtattttgtttctgatggctgggttcgcctggcagactaggcaaacttttgataatccagaaaatacacagcacgcccatcaccgccgccgcattaaagacattgcgccaaccgataagctcgcctaaaaaactgcccaacggcgcggcaatcaccagcgcaatagaaaccgcgccgaagatcacgctcagcgccttcggcaccgtacgcggcggcaccagacgcatggtcaggctcgcgctcatcgcccagaacccgcccagcgccagccccagacaggcacgaccgattaaaagcaaactgaaactgttagcaaaggaaaccagcaagcaggagagcgtcagcaaaacggcaaacaaaataacaacgtagcggcggtcagtagcctgaattgtctgggtaataaacaaactggcaaacattgccacaaaggcggtcacggtcacgctttgcccggcaaccccttcgctaatgcctaaatcctgggccattggcgtcaacaaactgacgggcaaaaactcaacgataatcagacaggcgacacaaaacgccacgctgaaaacggcactccagttcggtcgggtgatggcatccgcgccgcggttttcggcaataaattcactcatggtgttacccgtggcatgtttcaggggaaaagcgctccactttaacatactaatgtgactcgcatttaacgtttttgcaacttttacggtgttgctactgctggagttaagatcgaaacggaacagggcaaagattaccggatgcggcgtgaacgtcttatccacccgacaggtcaggcgcggtctgtaggctgataagacgaaacggtttcaatgcaaccagtgaacgccctcggcaggctgaaagaacgcgttatagcgcatctgaaaagcattaatatcctgcatttcaggttcggtttcgcgcagaaaacctagcgccagcctgacctgagcgtcggtaatcggcgcggcgaggcgagctttttgtaaaatccgatgccattgcagcaggttctgttcgctaccatcgacaatgacaatttgccagatgagcaacacctgcgcggcgttttgcaggtggctctcatccggacgatgcaaataacgtaaaaattcgtcaccagcactctttcccatttgatcgaccatgctctccacgggtacgacatcgatgttcagccgatcgctgagacggcgaatcgcttttctggccccggatgtcagcacccgaaaaccaaccacaaacactaccgccagcgtggcgagcattatccagatcatgagttctcctgcgtaatcagaactcatgatatctggaaaccctcgccagttattaatccaccagaataatcttcagtgcaaacagagctgcgaccaccaccacacacaggttcagatcgcgccagcgcccggtgcatactttcatgatgcagtagctcataaagccgagtgcaatcccttcggtgatgctgaaagtaaagggcatcatcaccgtggtaataaacgcaggcacgctttcggtaaaatcatcccagttaacgcgcgccaggctgctagtcatcagcacgccaacaaagattaacgctccggcggttgcgtaaggaggaactatcgccaccagcggactgaagaacataaccaacaggaacataacgccaaccacaaccgcagtcagccccgtgcggccaccgactgccacaccagaagtactttcaatataggcagtaacagagctggtgccgataaacgcacccgccacgctactgacgctatcaacatacagcgccttattcatattggggaatttaccgttaccatctattaagcccgctttatcagttacaccaattaatgttccactactatcaaataggttgatcagcataaaggagaaaatgataccggcgagttcaagtgttaacgcgccgctcaaatctacttcaccaatgacgccgctaatatcaggcggaatggaatagacgccgctaaaatgaacatcaccgaaaaataatccacagcaagacgtcaccacaatagaaaccagcaccgcggcatgaaaatgacgactactcaacacggttataataaaaaaccctaaaatacctaacaacacgccgtgagaacttaaatcgccaatcatcaccagcgtgtctttattggcgacaataacgccagtattttttaatcccattaaggcgataaataatccaattccgctggtgataccaatacgtaaacttaagggaatgttggagatcatccagtaccggatacgaaacagcgtgagcaaaaatagtccaactgcgccccagaatattgcgcccatcccggtctgccaggagatgcccatcgcccccacgaccacgaaggcaaagaaggcgttcagccccattgccggagccagcgccacgggtaagttagcaaatatccccatcgcaatactgccgataccggcaatcaaacaggtggtaacaaacaccactttcgggtccatttgtgccgcgccgaggatttgcgggttcacaaaaacgatgtacaccatggttaaaaaagtggtcatccccgcaatcaattctgtgcggacggtggtcccatgctgaggtagtttaaataatcggctaagcgtcccactttcattactcacgtaatcggtattgtcattattcatttttttgtccattggaggagatttaatcccttgcttttgtaaaacaaatgacaacaacggttcagtgataattatcacatttcaattgcacattaatggatattctttaataatctcgcgacgtttctttatgataaataataatcaaattgataaaatcaaaatgagaaaaatatgaataattctattaaccataaatttcatcacattagccgggctgaataccaggaattgttagccgtttcccgtggcgacgctgttgccgattatattattgataatgtctctattctcgacctgatcaatggcggagaaatttccggcccaattgtgattaaaggacgttacattgccggtgttggcgcagaatacactgatgctccggctttgcagcggattgatgctcgcggcgcaacggcggtgccagggtttattgatgctcacctgcatattgaatccagcatgatgacgccggtcacttttgaaaccgctaccctgccgcgcggcctgacgaccgttatttgcgaccctcatgaaatcgtcaacgtgatgggcgaagccggattcgcctggtttgcccgctgtgccgaacaggcaaggcaaaaccagtacttacaggtcagctcttgcgtacccgccctggaaggctgcgatgttaacggtgccagttttacccttgaacagatgctcgcctggcgggaccatccgcaggttaccggccttgcagaaatgatggactaccctggcgtaattagcgggcagaatgcgctgctcgataaactggatgcatttcgccacctgacgctggacggtcactgcccgggtttgggtggtaaagaacttaacgcctatattactgcgggtattgaaaactgccacgaaagttatcagctggaagaaggacgccggaaattacaactcggcatgagcttgatgatccgcgaagggtccgctgcccgcaatctcaacgcgctggcaccgttgatcaacgaatttaacagcccgcaatgcatgctctgtaccgatgaccgtaacccgtgggagatcgcccatgaaggacacatcgatgccttaattcgccgcctgatcgaacaacacaatgtgccgctgcatgtggcatatcgcgtcgccagctggagcacggcgcgccactttggtctgaatcacctcggcttactggcacccggcaagcaggccgatatcgtcctgttgagcgatgcgcgtaaggtcacggtgcagcaggtactggtgaaaggcgagccgattgatgcgcaaaccttacaggcggaagagagcgcgagactggcacaatccgctccgccatatggcaacaccattgcccgccagccagtttccgccagcgactttgccctgcaatttacgcccggaaaacgctatcgggtcattgacgtcatccataacgaattgattacgcactcccactccagcgtctacagcgaaaatggttttgatcgcgatgatgtgagctttattgccgtacttgagcgttacgggcaacggctggctccggcttgtggtttgcttggcggctttggactgaatgaaggtgcgctggctgcgacggtcagccatgacagccataatattgtggtgatcggtcgcagtgccgaagagatggcgctggcggtcaatcaggtgattcaggatggcggcgggctgtgcgtggtacgtaacggccaggtacaaagtcatctgccgttacccattgccgggctgatgagcaccgacacggcgcagagcctggcggaacaaattgacgccttgaaagccgccgcccgtgaatgcggtccgttacccgatgagccgtttattcagatggcgtttctttctctgccagtgatccccgcgctaaaactaaccagtcaggggctatttgatggcgagaagtttgccttcactacgctggaagtcacggaataataaaaaaagcccggcgtcatgccgggcaaaagtcaccagttacgtttatgccactgtcaactgctgaatttttttctcgcggcggattttgcgttcttccattaccgccactatcgccatcaggcagatacaaccaatcgcggcgatatccagcgcggcgaaggtgcctgcccagccggtaaggccgaataccggcgtcccatcggcaatcattcccagacctaacttggcaaagctgtcaccaatcaggtaagcaaaggtgcctttaataccatcggcagcgccaatcgcttttttaggtacaaagccaacagcagccacaccaatcaacaattgcgggccaaagaccaggaaacccaacgcaaagagagaagccagatagatatattcgttactggcatgttgatacacaccgagcgtggcgataatcagcgccagcgcgatgcaggccaccaggccacggcgaccgttcgccaggtcagagagccagccccacagcagcgtaccgaccagcgcaccagcttcaaacagcgtaaagccctgaatcgccaccgctttagagagtttcagttcctggaacgcgtatacggtactccactggtcgataccaatacgtaccacatagaggaaaatgttggcgaagcacagcagccagatcactttgtttttcagcacatactcaacaaagatctgccacttggtcatatcggtagattctgtctctttgtcctcttcgctgatctcctcgccgaacagttcttcagctttgccgaggccataagattccggggagtcgctgccgtaacgcaggccgataaaaccgacaatcagcgcgataatgctcgggaagataaacatgccgatgacatggccatcgaacaggtaatttgccccgaacagcgccacacctgctgcgcctgcaccgccaaggttgtgagaaatattccagaaaccgaggaatgtcccgcgtttacgacgcggcgtccatttggtgatggtggagtaactgcagctaccgccggtactctggaaaaagccgcttaaggcgtagaaggcaatcatcaggaacaggctaacgctgccgctgcccatactggcactgaagcccagcatacaaatagcagagaggatcagcatgaacggcaggaattgtttggtgtttttgccgtcggcgtagtaggaaaccagcgttttacccacgccataagtgatggagaaacccaggccgatcatccccagctgcgtcatgctcaacccgtaggtgctaatcatatcgttctgcgcgatgttaaagttcttgcgaatcaggtacatcgtcaggtagccgataaagaccaccaggtaggattgcatgaacggtttgaaccacattttgcgccgcacttcgagcggaaggtccagggtcggcttgcgaacctggtttaagaaagccagcatgggttactcctgaaatgaatacctgcgtgaggcatgcattgtaaaaatcagcagcaaatcaggcctgagatagcgtccaggcaaaacctggaaaatttcttagttttgccggatatgaagtgaaaaggtgagatgcatcacgcttcgcgcggtgtctgggcgttcaaaaagggcagtaacagcagtgcggaaatcccggcggcgatagagataaccacaaaaaatccgctccagtgccaggtatcgagtactttcgccagcggccaaccagcaaggctcgcccccagataagcaaacaagccgacaaaccccgtcgccgcccctgccgcctctttgtgggaacactctgccgccgccataccgattaacatctgtgggccaaagacaaaaaaaccaatggtgaagaagcaggttgcctgcatcacgtagctggcaaatggcatcagccacagggagccgacactaagcaaaattccggcggcgaaaatcaaattcatcggccctcggttgccgttaaacaatttgtcgctgccccaaccggctaccagcgcaccgataaatccgcccagttcaaacatcgtcactgccgtattcgccgtgaccagatcgacgcccagtgtctcggacatatacaaattgccccagtcgttgatcgccgcccggaccacatagaccagcacatagcaaaagctaagcagccagatatacggattcagcaacacatatttggtgaggatctctttacgcgtcaaccctgccccttcttgttgttgagcaatttccagcgcgtcgtgtcgccattcaccgaccgccggtaaacctaacgcctgcgggcgatcgcgtagccgccagcagagaaaaatccccacgactatcgccatacaaccagcaatcatcatcccggcacgccagccgtaatgcagcgcagccgctgccatcacaatgggaatgagtgcgccgccgacgttatgcgccgtgttccataatgcccaccaaccgccgcgctcggtacgactataccaggccgttaacagacgcgcacacaccggactaccccagccctggaaaaaggcgttcagcacccagagcacggcaaacgcccataggctcgtgctgaagccaaacagaatgttgataatgcccgtggcgataagccctatccccataaaataacgggcattactgcgatcgctgacaatgccggagacaaacttgctcacgccataggtaatgtaaaacagggtcgctaacaggccgatatcgctacggctgagcacgccgttagcaaggatttctggtacggcggcgttaaaacttttccgcgtgaagtaaaacagcgcgtaacccagccagatggtcagcagaatatgccgacgccagtagcgatagcgggcatcaatttcatatttatcagtcattaatggcgcatcggcaggcgctttcagaaacggcaacatcatcaaaccttagacatagcgttgaggtagagaaacgctgacacgcgtgccgtgcagacaggaaatgtgtaatgtgccacccagcgccgttacgcgctcgcgcattccggtgaggccaaaaccttgttgcccggaacccggcggcaaaccgctgccatcgtcttcaataaccagcatcaaccgttcatcctgctgccagccttgcagggtgaccgcgctggcatcagcatgtttcacaatgttgttcagcccttcctggcagacacgaaacagcgtcacgcgctggttttcgcttaacgcactttcatcgattcgccattcgagatggctgacaataccgcgcccttccagctccatttcccgcatcagactgcggatggcctgctccagggtgagatcatccaactggcgcggacgtaaccgacccaacaaacggcgcaccgcgtcgtaaacgcccaggcttagttgttcgatgagctgcccgctctgcttcacgctggcgttatctgccgccagccgctgaacaatgcccgcctgagtacgaatagcagtgatggtctgaccgatatcatcatgcagctcacgcgccacatcacggcgcacgctctcttcggtttccagcaaccgttcagccagatgctgattgcgcgccagttccttttgcaggctctggttaagttcacgcaaccgctggatgccagcgccaagcaacaaccctgtcagactttgcaccagcaggctgagcaataaatccaccggatgatcgcgccaggtttgactggcgatcagcgcgatggcgttcatcaacgtcgcaatcagcgccccttgccaaccatagtgccaggccagcgcgataatcggcagcgccagacagaatggcgtaaagcggctcagttcgtccggcaatcccaactggagccagagactgataacaaacagcagcaagtaccagaccagatgtcgcccgcgccagttgattggctgagaaaccagactcggaccgagcggcagccaggtgttattggcgagatagtgccagaacaccagacatatcggggccagcgtcaggccgccagttaaagtcagcaacagcgcattccagctctctttgccgtgccaaagccagggcaggctctgcaacaacgccgccgccgttaacgccgccccctgtaacagcaaggtgcgccagtcacgctgatggcgatagcggctgatcagcgctacgggcagtaacgtcagtaaactaccgatcatcaataacggaaaatgggttaaaccgaccgcctgcgttagccagtaaatcagcagccactccgcgcccagcaatacgggccagtatccgcgcgggcattgcagcattagccccagacgcagaccaaacggaaataacagcaccgccatatcagggcgctcaaccagatgcaggctgatactccacaggcaaaaccatgcggcagagaagataaaaaagcaggcaataacggtaattaagcgggagaacaacgtcttcatcaccagccatcaaacatgcggcgcgccagctctacgtcgttactgacgcccagtttttccatcagattggcgcgatggacgtgtaccgttttcggactcaagcccagttcggcggcaatctctttcaccgccattccttgcgccagtttttccgccacctggcgttcacgtttggttagcgggtcctgacgaccggatgccagtttaatggcaatatccggcgtcagataacagccgcccgtggcaaccgtatgcaccgcagcaatgagttcatccgggctacagcgtttggaaagaaagccgcgtgcccccgcgttaagcgcctgctcaaccagcgcaggactgtcgtgaacggagagcataatcgtcgccatacctttcggcagctggcttagcagctccagaccggagatatcgggcatggagatatcgcaaatacacacctgcacaccgcgccccggcagccccgccagcgcctcgcgcccgctaccaaactcggcaactacctgcaaatcaggttccagccccagcagctgcgcaaagccggagcggacgatgaggtgatcgtctataagggcaacggtgatcatggtcttgtcctggcgggtaaaaaaaatacgcgcttaccttaacgataagcgcgatgttgttcaagccttgagcggttactgaaaaaacaccgcgatcttgttaaacatcgtcggatcggactgattacgctgcactttcacgacatcttccagcttatcgatttggcttatcatctgctccagacgctggtcgtcattgaccagtagccagatatggcttttgtcgctgtcctgaatcggcagacaaagaatgccttcaacgttaaaagcgcggcgggcaaaaaggccacaaacgtgggtcattacgcccggatggttgcgaacggtgagctccagaattacgttgtcatgagttgtgttttgcatggcttattcccccaccatttcagtattcgccgcacctggcggcaccatcgggtaaactttttcttcggcatcaatgcgcacatggatcagcgccgggccagggcgattgatgatttcctgcaaactagcctgcggatcggcttcgttattcaaatcacaggtttcgaggccgaatccggcggcaatctgcataaagttgattttgcccggataggtggcggcaaaaacgccttgctcgtagaacagactctgttgctgatgcaccagccccagcgcttcgttgttcatcagaatgattttgacatccagctgattttcactggcggtcgccatctcctgaatattcatcatcaggctgccgtcgccggagaaacacaacactttgcgatccgggttcgccagcgcagcgccaatcgccgcaggcaggccaaaacccatcgtgcccagcccaccggaggtcagccactggcgtgggcgattgagcggataagcttgcgcggtccacatctgatgctgaccaacgtcggtggtgataattgcattgtcatcgacacaggcggcaacggcgttgatcaggccgtaatggcttaacggatcgcacgctttcgggattggacacggaaactcacgctgcaaatccgctaccaactggtgccactctgcacgcggttgcgcttccaccagcgggatcaactgcgccagcacgtcatcaacatccgcctgaatcgccacgtgcggctgcttgattttacccagctctgcacggtcgatatcgacatgaatgattttggcattcggacagaactgctcggttttgccaatcgcccggtcatcaaaacgcgcaccgagcactatcaacaaatccgcctcctgcaaaatatagttggtgctgcgcacgccgtgcatccccagcatacccaggctcaacggatgcgcttttggcaacatgcccagcgccattaaagtcatggtggtaggcagttgcgctttctccgccagttcacgcacccgtgcgggcgcattgatcacaccgccgcccagataaagcaccgggcgtttggcagcgttaatcatcgccgctgcgtcacgaatgctttcttcgctaaaggcgggggcggcggctttttctgccatagcgggctgtgtttcaatctcaaaaactgccgtttgcacatccttaggaatgtctatccacaccgggcctgggcggccactttgcgcaatgcggaaggcatcgctcatgacctgcgggagttcttcgatatgtctgaccagatagttgtgtttggtgatggggatagagatgccgtaggtgtccacttcctggaaggcgtcggtgccgatcatgctggcgggaacctgaccagtgatgcaaatcagcgggatggagtccagccgcgcatcggcaatggcggtcaccaggttagtcgcacccggtccgctacaggccatacagaccgccggtttaccgtcggtgcgcgccattccctgagcgataaagcccgcgccctgttcatgacgggccagaatatggcggatttgcgtgctttggcttaaggcatcgtaaacaggcaggatagaaccgcccggaatgcctgtcacaatcttaatgccctgctgttccaggaaatgaacgataaattctgcgccggtaaagcgcttacgcgtgcttgttgtgccgctacttgccatgctccagtccttttcttctgggccgactttccgggaggtgcttaaacgaaaaaccccgcccggtttgcgccggcggggttttggaatcgtgtgttgttccagtccttacggcgcattgccgacgaccaccaccacacgcacgacgaccactgcggcggatggcgcagttggtagtagttttgcgttgagcatggaagtagtcattggggaccttgttggttttgtgtttaacaatatttatacaagcacagctttacaggggagacaatggaaaatttttcagcaagggaaaattgaggggttgatcacgttttgtactgaattgcagataacaaaaaaccccgccggagcgaggtttcgtcagtcgcctgcggctggtaaccgcaaagcacactgtattatgtcaacactgaaagtatacgtgttccgcgcagaacgcgcaatttcggcacgaattttgacgtatttagtgcatagttgagtatcgatcacagtttgcgttttgtccaaatattactgtttatttatacagtaaacttctataatatcactgtacgcaatgtgttatgcgggggccgcatcgttacccggcgcactaagttctggctgaaacgggtggtgccgtcagcgccttaaccccgcgtgagcacactgtgttatgtcaacaagcacaacgtttctccttgagataccgcgtgcacaacagctggcaacaggcagcggaaaggtacgtcagctggcagtgctcctgaaccacaggagacgcgtatgaacctggtggatatcgccattcttatcctcaaactcattgttgcagcactgcaactgcttgatgctgttctgaaatacctgaagtaattcagattcaagtcgcaccaaaggggagcgggaaaccgctccccttttatatttagcgtgcgggttggtgtcggatgcgatgctgacgcatcttatccgccctaccatctctcccggcaacatttattgccgcttttgtttacatattctgccgctaaacaattccccattcctggcgtatatctggctaacattcatcaatgtgatagattcctctcccgcatttatgggaatgcgtagtgacttattctaattatttttataaaagcatccgtgataatgaaaaggcaaagaaacgtcaatttgttattgatgttggtattactcgtggccgtcggtcagatggcgcaaaccatttatattccagctattgccgatatggcgcgcgatctcaacgtccgtgaaggggcggtgcagagcgtaatgggcgcttatctgctgacttacggtgtcagtcagctgttttatggcccgatttccgaccgcgtgggccgccgaccggtgatcctcgtcggaatgtccatttttatgctggcaacgctggtcgcggtcacgacctccagtttgacggtgttgattgccgccagcgcgatgcaggggatgggcaccggcgttggcggcgtaatggcgcgtactttaccgcgagatttatatgaacggacacagttgcgccatgctaacagcctgttaaacatggggattctcgtcagtccgttgctcgcaccgctaatcggcggtctgctggatacgatgtggaactggcgcgcctgttatctctttttgttggttctttgtgctggtgtgaccttcagtatggcccgctggatgccggaaacgcgtccggtcgatgcaccgcgcacgcgcctgcttaccagttataaaacgcttttcggtaacagcggttttaactgttatttgctgatgctgattggcggtctggccgggattgccgcctttgaagcctgctccggcgtgctgatgggcgcggtgttagggctgagcagtatgacggtcagtattttgtttattctgccgattccggcagcgttttttggcgcatggtttgccggacgtcccaataaacgcttctccacgttaatgtggcagagcgttatctgctgcctgctggctggcttgctgatgtggatccccgactggtttggcgtgatgaatgtctggacgctgctcgttcccgccgcgctgttctttttcggtgccgggatgctgtttccgctggcgaccagcggcgcgatggagccgttccccttcctggcgggcacggctggcgcgctggtcggcggtctgcaaaacattggttccggcgtgctggcgagcctctctgcgatgttgccgcaaaccggtcagggcagcctggggttgttgatgaccttaatgggattgttgatcgtgctgtgctggctgccgctggcgacgcggatgagccatcaggggcagcccgtttaagcgcacgtcaccgcagcatcgtcatcagctccatgggagaacgatgctgctttatcagatcacgcatcacccgcatatgcggtgcggagtaagaataaaacgcctgatagcccgcacaaagcacgctgtctggcgtctcctgccgagcgtgcgggcacaggcgatgccagtcgcacgcctggcagtcacagcgcggttgcgggttttcgctgccacaccatttttgtaaggtggcgtcaaaaagctcaatgctgatacgactgatatctgcccgcacccaacactcgaacagggcaattaaaaatttcccccacagctctgctgtcacgctagcggccgtcagatcgccccggtcatcaaattcaagatagggaatgagctgtacggagcggatgccccgctgtttgaaattgtgataaaaatcggcaggttgcagagcatccttgtactctacaaccagtttatgcctgtcctcttcagcatcaatgacctgacttcctgtcatgcgactctctcaataaatacgataagttgatgtatatgcgttacagcaaacagtattgcgagagataacaccgcgagggagatcaaaaatttgtcacggactacgtgaaattgggaaaaatcgctattcgtgacatccattaaattgcgattacgggtgtagtgccagaggatcagcgccacgatggcgagaatgccaatgctaatccagaataacatgcccgcctggtgccagttgtgtttgatagccaacgccatcaacgcgccgtagcccagcatggtacgaaaccacgccagacttgtgcgctccggctgcagtcctgggtcggcaatgcgtctggctttgcggctatccggcatacaacaccagtcccataacgttaattatccggcatacaacaccagtcccataacgatcaccgccacgaccatcaatattaagctaatgattaataagctgttggtgtagggcaggtcctctttcagacgcatcgctttttcattgcgtaaccagcgcaagtagccatacatcgctaacccgccggaaaacagacacaacaacaacgccagcagttcgcgaatgacgggcgtggcgaaatctggcgcaagttgatcaagcccaacccccgccgccagaaatcctagtgcagtacggatccacgccagaaaagtacgctcattagccaggctgaagcggtaatcaggcgcttctccgaggcgggaaattttcattgttgctcctttgcaatttcactaacgctctacctttagcggtttttttaagaatttcgtccgcccgtttcctgatatgcttttgccatccgctacaaggaggtcagatgggtatcatagctcaaaataaaatcagtagtttgggcatgctgttcggtgccatcgctttaatgatggggattatccactttagtttcggccctttctccgcaccaccgccaacgtttgaaagcatcgtggcggacaaaacggctgaaattaaaagaggtcttctcgccggaataaaaggcgaaaaaattaccaccgtggagaaaaaagaggacgtagatgtcgataaaatcctcaatcaaagcggtatcgcactggccattgctgcgctactttgcgcatttattggcggtatgcgtaaggaaaatcgctggggcattcgcggcgcgctggtttttggcggcgggacgctggctttccataccttgctttttggtatcggcatcgtgtgcagcattttgctgatattccttatcttttccttcctgaccggcggtagtctggtttaagcagcctgaataatgcccgccgggtgatcatcagcgggcattatcgtcagaacttctgttttttctcctccaccttcaccccttgtgtcggtaggccggtgtcatagtcgcgtacaactgggctatagccatcttgtggacgtggacgaaacgcccccatccagcgcggccgtgcatctttacgccacggacgcagactccattggtaactgcggaacggatcgcgaattttgtccatgtaatccaataaggcgtcatgcattttgctgcgaacgtctgcaaaacggatatcatcgatcaggttatgcatttcatttgggtcattacggcgatcgtaaagttcatcactggtgaagaggttgagtaccagtttaaagtcatccgtcacccagcaacgcaccggaataaaaccgccaaagctgtcatgctcaatctcgtagcggttaaattccaccatcacgccgcgtggctctttcacggcaaggatattttcccccggcagaatctctggtttttcaatatctgccagcgccatcattgtcggcagtaaatcgatatgactgactggcgtatcgacctgtcgccgctccccttgcgggctacggatgatcagcggaatgcgggtgatgtcgtcatacatcgccgcccctttactgatcagcttatgtgcgcccatcatttcgccgtgatcggaggtataaataacccacgtattttcacgttgctctggcgttaaggcattgatgacccgtccgatttggtcatcaacaaagtcattacaggcaaaatagagcggatggtgataaagcccgtcatcaccgactgggcttggcatcgcctgcgcccataagcggtgatgttccggtttgttagccaggtcatcctgtgctttctcgcccagctcgtagtaaaaatcagcgtatttctctaaatactccaccggacaggtgaacgggtgatgcggctcatcatagctaaccaccatcaggaaaggctcgtctgcgcgcgcaggctgttgcagaaaatccaccgcccgattgctgatacgatgcgcccaggtgaaggtttcgtcgatatggttcgcctgtaaatcttcgacgctgtttaggccattgcgccacaggctaatctctttttccgtcagttcgctaagatagttcgccccatcgaaccagtaatcagcgtcccactccggcggacactcgccagtgccgaaatagtcatgaccgtcgagatgccatttgccgatgtaacaggtgtgatagccggcatccttaaagtagcgccccatagtggagatgtttttgcctggcgcgacgttgttggtccacgggccggactggttagcgtagataccggtaaatagtccggcccgtgcaggcgtacaaaccggactacaggtgtaggcggaattaaagcgaataccttccgccgccagactatcaatattttgcgtattcagcggtttaccgctatagcaaccgaccatattggtggcctgggtatcggtcatgacgaacagaaaattggggcgtttcataggctatccttcccgtcgggagtaaaggttacggctgggtcgtgacgatgccgccagctgtcaaaaatcaggtagacaatcactacggcggcaatgaaataactgatcatcgctaaccagcgcgtaccgtagccgccgaattcagccagcccggcatagacgccaatcatcgcgaacaggatgccaatactcgcgatcttgacgtttttccacggtttcatgtccaccgcaaacgcatctttgaaggtgaacggcgtggcgcgcggtttgataaaaccgatcaccagcatcacgaccacgttgatgcagaacgtacaggccagcacatagaggaaatggaagtcgaacttcaccagatagttgatggtgatgtagctgattatgccaatccccatcgctacttttgccgccagcgccgggatgcgcgggaagaaaaagcccataatgatgatggtaaccagcggcacgttgtaaatgccgttgagctgtttcatccagctatacagcccctgcggcgcgttggcgatccacggcgcgaccagcacgctaacgatagcgataaagaaaccaaatttgcgcccgacggtgaccagctgctgcggctcggcattctggttaatgatgcgacggtaaatacccatactgaataacgtactggcgctattcagaaagccgttgaaggtactgatcaccgcaccaaataacaccgcgccgaagaaacccaccattggcactggcagaacgttattgaccagcgtcgggtaggccatgtcggctttcggtaaatcctgatacagatgaaacgcaatcaaccctggcagcaccagtaccagcgggtcgagcattttcagcaccgccgttaacagcgcccccttttgcccttccgccaggcttttactcgccagcgtgcgttgcacgatgccctgatttgtacaccagtaaaaggtgttcaccagaatcaaaccggtaaatgccgcgccaatcggcaagggatcggtcgggccaccgatactgtttaatttctcggcgtgaacggtggtgagttgctcaatgccctgcataaagctgcccttgcccatcgcgattaggccaaataccggcaccatcaacccgccgataaccagcccaataccgttgatggagtccgccactgccattgcgcgcagtccgccgatcaccgcatacaaaattcccgccagaccaagcaaaattaccagtagccagatagccgcaccgtgagaaatctgtaggctttccccgacgtgaaacaggctgttgagcgccaacgcgccggagtagagaacaatcggcagaaagcagacgccggtggcaattaggaagcagaagtcgatgataatacgcgtcgttttatcataacgttcctccagaaaatcggggatggtggcaatgccgcgcttcagatagcgcggtaaaaagattagcgcgaggaagatcagcgtcaccgcactagtcacttcccagcccatcacgctcatgccgcttttgtaggcctgcccggaaaggccgaccagttgttccgtggaaaggttggttagcattaagctagcggcaataaccggcgcttttagactacgtccggcaagaaaatagccttgttggcttccggtatctgttttgcggaccttccaccaggtgatcaccgccaccagcagcgtaaaaccgacaaaactcaagatttgtaagctattcatctcatagcccttatttatgtttatgtcccggacgcatgaatatagggagaggtaaaatgcgtcgggtcaggcagtcagattcttaaaatacaaacgtcgtatccctgaacggattgttttctgttaagttcaggttgtgagcataattcgccggagggatattaaaatgaatggaaaattgcaaagtagtgatgtaaaaaacgaaactccgtacaatattcccttattgattaacgaaaatgtgatctccagcggaatttctctgatcagcctctggcatacctacgccgacgagcattaccgggtgatctggccgcgggacaagaagaaaccgcttatcgccaacagttgggttgcggtgtataccgtacaaggatgtgggaaaattcttttaaagaatggcgaacaaataacactgcatggcaactgtattatattcttaaagccaatggatattcactcttatcactgtgaaggtttagtctgggaacagtactggatggaatttacccccaccagtatgatggatattcccgttggtcagcaaagcgttatttataatggcgaaatttataatcaggaactcaccgaagttgctgagttaataactagtccagaagcaataaaaaataatctggcagtcgcttttctgacgaaaattatttatcagtggatttgtcttatgtacgcagatggtaaaaaagatccacaacggcggcaaattgaaaaattaattgccactttacatgccagtctgcaacaacgctggagcgtagctgatatggctgccacgatcccctgtagcgaagcctggttgcgtcgtctgtttttacgctataccggcaagacgccgaaagaatattacctcgatgcgcgtctggatctggcgctaagcctattaaagcaacaaggaaacagcgttggcgaagtcgctgatacgctcaacttcttcgactcctttcatttcagcaaagcctttaaacataaatttggttatgcgccgagtgccgtgctaaagaatacggaccagcacccaacggatgccagtccacacaattaacgtaactctggccagtacgctttgttggcctccagcaactcatccagaatagctttggcgacgctggcgctcggtaccgttttgctcaacgtaatcgcctgccacaggtgctgataactacgctgttcccaggcgtccacgaccagtttttccaccgccacttgctgactcattaaccctttctgaaactgcgggatatcgcgctccaccagtggttcaggccgtagtagcgcacgcgcatctgtttgcgatcttgcagcccaacaatttgcgccatccggctttcaataccgattggcatgtcacagatgttgaggattttcgcattcgggcgcagacgacgcgtggcttctgcgacaatggctgccgggttggagtagttgagcatccaggcatttggactatatttttccatataatccaccagttccaggacgccgccaatggaacgcatgccgtacgctattccgccgggtccgcaagtttcctgaccaacaacgccgtggcgcagcgggattttttcatccagttcgcgcatcgggtatttgccgacgcggatgtgcgccatgacaaaatcaacgtcgctgaatgccacttcaggatcggtggtgtaactaaacgcaatgtccggcgctttttctttaaggatgactttacaggcttcggcaatcacttcctgccgcgcaccatcgttatcataaaatttcagtgcacgaagcgggaaacggtcctgattcgccaggagcatcaacacgatgcctggcgtaaaggtgcttccaccgcctgcgacaaccacactgaatttggtcattatactgcctccgtaatggcaacattttctgcactttgatgagaattaattaagctatcgagctgttcacgcagctgagatacatgcagaccaatgatcacctgaatggcatcgccactacggaagacgccgtgcgctcccagctttttaaagacttcgtcatccagcgtttgactcatgtcatgcagtgcaatacgtaaacgcgtcgcgcaattgttaatgctggagatattgccgaccccgcccagggcttgcaggataccggcagcctgatccagctctttttttggctctgccgcggtggtttggcctcggctggctttgtattcggctttactgtagagtttcacttccgcatcttcacgtcccggcgtgcacatgttgaactgcagaatcagtgtgcggaaaaccacgaagtacagcagggtaaagcacaacccaatggcgatttgggtcagcatcatatccgcgtggttgctgaacatcgggatccagttttgcggtaaaacttagtcaatcagacctccgcccatgttgcccaccacaccaaagagatacattacggtgctcatactggccgccagcacggcgtgtaccgcaaacagcaacggactaatgaacaggaaggtaaattccagcggttcggtaattcccaccagcatggcggttaaggttgcgggaatcagcaagcccgccacttttacccgattttccggtgcggcagtgaagtacatcgctaaagaaatgcccacggcaccaaagattttactgttaccgtgcagggcaaaaccgccttccgggaacaagcttttcagcggctcggcgctcaaactgaactcttgcagatgctgcgcccagtacatctgaatgccgccttcaacagctgccggaccaaagataaactgtccgtagatgaagtggtgtaaaccggttgggatcagaatacgttcgaggaaggtgtaaacccagaccccaagtgcacccgcgctacgcaggaacgcttgcagagattcaatccccatttgtacttttggccagccgagcaacgtcagccaggcacaggggatcatcaccaggaaggcgataatcaccacataagacgtcccctggaaaatgccgagaaaaaccggcagttttttatcgaacagacggttatgcagcgccgtcacaatgccggaaatgataattgcgccgataatgctggtatcgagggttttaatcccggccatcattgtcagaccgctacctgccaccgcgtcctgagtgaaatcgacgccgaagtagcttccccaggtcattcccatcgcgttgatgaaatagttccaggtcaggaaactcaccatcaccgccagacaagcacgcccctgcgcttgcttagcaaggccaatgggtaaaccgacagcaaaaatcagcggcatattacggaataccgtccaaccgccctcttcaataatgtgtacgatttgcgcgaataaactgttcggatcggtcagactttccccgacaaacatcgggttttgcagcaagatggcaagacccaccacaatcccggcgaagggaaacagcagcactggcgtgaacatcgcgccgccaaagcgttgaatttgactgagcatttccacatcctcttttctcaattctgtaagtaggaagcctgattggttatgcggcaggcctggagcgaggataggaagatgcgatcggcagaacatgacgacccaatgggattcgtgatcgctttcatgcttttcgttgggcggtagagatctacgttttcgcgaaaaagtagacctctgtgagcacaggtacacagcatcgaacacatctttaaaaaaaagatgttttttcaatcgattaagcagaacttgtgtgcgcattacccgggcttgcaggcaaaaaagagatctagagatgatctacaaaagcattgcggagcggttaagaattcgacttaactccgcagatttcacgctaaacagccttcttcccggtgaaaaaaagctggcggaagagtttgcggtaagccggatgaccatccgtaaagccattgacctgctggtagcgtgggggctggtggtccgccgccacggtagtggcacttacctggtgcgcaaagatgtactgcatcaaaccgccagtctgaccgggctggtggaggtgttaaaacggcagggaaaaacggtcaccagccaggtgctgatttttgaaatcatgcctgcgcctccggccattgccagccagttacggattcaaatcaacgagcagatctacttctcccgtcgcgttcgttttgtggaagggaaaccgctgatgctggaagacagctatatgccggtaaaactgttccgtaatcttagcctgcaacatctggaagggagcaagtttgaatatattgaacaagagtgcgggattttgattggcggtaattatgaaagcctgacgccagtgctcgccgatagactgctggcgcggcaaatgaaggtagcggaacacacgccactgctgcggatcaccagcttgagttatagcgagagcggggagtttttgaattatagtgtgatgttcagaaatgccagcgaataccaggtggagtaccatttacggcgactccacccggaaaagagttaaccgatactccagaagagcaccgccagtaattggggggtgataatgcgcaggaacattaccaacggatagacagtggcgtaagagagcgccgccgcaccgctggttggatgaagattattagcaaacgccagcgccggaggatcggtcatggaacctgccagcatcccgcacatggtcaggtaattcattttggctaacatccgcgccagaatgccaacagtaatcagcggaacggcggtgatcagggcaccataaccaatccagcttagcccttcgccattgaccagggtattcacaaaatccccaccagatttcagaccaacgacgctgaggaacagcacgatccccagctcccgcagcgcgaggttggcgcttggcggcataaaccagtacagcttgccgatactgccgatacgcccgaggatcaacgccataatcagcggtccgcccgccagccccagtttcaacgcggccgggaatcctggcacaaagacgggaatagaacctaacaatacgcctagcccgatgccaataaacactggcagcatctgaacctgttgcagtttttgctgcgcattccccagcacattggcaacggcatcaattgcggacggacgccccaccagattgaggatatcgccgaactgcaggctgatatcgccactggcgaccagttcgaccccggcacggttcaggcggctgataacaacgtcatagcgttctttaaagtgcaggtcgcgaatacgttttccgagcacgttttcattggtgaccaccacacgctcgacgcgcaaatcagtgcctttcgtggacaggctagtatcgacctcctgaccaatcaccagttgcgcattatgtaaatccgctggctgacccaccagatgcagcaaatcgcccagttggataatggtatctgggctaggaacttttagggtttcttcgcgtttcagacggctgcagataattttgtcgccgttgagaatcggtacatctttaatggctaaatcatgcaggttagggttctcaacgcgaatattgatagtcttgatcagcgcgccgccattggtgcgactagactcgtgctgctgagcttctgtctcgacattgacgcggaaaataacccgcaacatccacatggtgaacaaaatcccgcaaatgccgaatggatacgccatcgcgtaactcatccccatctgatcgaccatttccattggtgtacccaggtcgcgcaaaatctgctgccctgcccccagcgctggcgtattggtaaccgcaccggagaaaatccccagcactaccggcagtggaatatcaaacagtttatgcaggatggcggtaaccagaccaccgatgatgacgatcagaacagcaaacaggttgaggcgtaatccggagacgcgcaaactggcaaagaagcccggccctacctgaatcccgatagtataaacgaacaggatcaggccaaattcctgaataacatgcagcatatcgctacttaatgtcatccccgcctgagaaacaaaatggccgacgatgatcccaccaaacagcacgccgccaatacctaatcctatgccgcgaaatttgacgttgccgataaacaaaccgacgactgccaccaaagccagaatactgaccgttaatgctatatcactcatcgtccatttctcttgagataacattttaattgctacggattatggctgaatcggtgaagcagatttgccttatagcgcacattatcacgggaaagaacgtgccgaaatatcttaaacagtcgaaatttaacgcattgttgagtaagtaagacaaaaaaagccccaccagaatggcggggcaaagagaatagctagttagctatttaacgcgggacgttcgctgatagcgatacgctgcgctgcgatgggttcaggctcattacgaattaaatcaatatgcagtaaaccgtttacgaaggttgcgccagagacttccatattttcagccagcgtaaagctcaggctaaatggctgattcataagcccttgatgcagccattttttctcttcttttggctgctccggcgtgccttttacgctcaggcgcgtaccttccagttgaatctctaaatcttcctgacggaaacctgccagcgcaagggtaatgcggtagtggttatcgtcgcttttctcaatgttgtacggcgggaagctctggctttcaccggcgttttgcagtgcgttggccagtttgtcaaaaccgatccattgacgcatcagtggggataaatcgaagttacgcatagtcatttctccttctaagaagcgagtaagtacctgcaaatccgaagattcgcatatgctccctgacggcgagcatggagatgtcaggccgcgccaggcggccttagggaattagttgatttcgatacggcgcggttttttcgcttccggaatcacgcgttcgagatcgatatacagcaaaccatttaccaggttagcaccacgaacatgaatgttctcagctaactggaatttgcgttcaaagttgcgttcagcgatgccctggtacagataggtgcgctctttttgttcgtcggcgtgagcacctttcaccaccagcagattatcctgggcggtaatttccagttcgctctcagcaaaaccagccacagcgatagcaatgcggtaatggttttcgtctaccagttcaacgttatacggagggtagccgccattactctggctctggttgttttctaagtggttaaacaaacggtcaaatccaatagcagaacggtaaagcggggataaatcaaagttacgcataatcaatagctcctgaaatcagcgagaatgtaagaccttccacaatggacaggtcaggtagccagaacacccatcaggcgcgtcctcatcggctacgatgtaaaaatgggtctggaaatgaacttttcaagccttatcagcggacttttttttgcagtttatggtctattgcatagactgagggggcagcacgaaacgttaaagtgcgatagccgccacagtgcgacgtaatgatgatgttattttcagcaagggatcgctataactcatcaggccaacacccacgatcaacagatgaatttattatgataagaaatgtgttgttagcgttcatgatatgcagcggaatgacattactcggaggatgctccagcgtgatgtcccataccggagggaaagaaggaacgtatcccggcacccgcgccagcgcaaccatgattggcgacgatgaaaccaactggggcactaagagcctggcgattctcgatatgccgtttaccgctgtgatggacacgcttttactgccgtgggatgtgttccgcaaagacagcagcgtgcgcagccgcgttgaaaaaagcgaagccaacgcgcaagccaccaatgcggttattccaccggccagaatgcctgataactgatttagcgatcagtttcggtgatccacagctggccgccttccatccacgccagccactgaccatccgggctgaagaccacggcgtccgcagaaggactattggcgtggtgttcggttaaatactcaacctcgccgctttgcgcatgggcacaagcaattcgattatccagcacaaagcccaaccattctccactcggatgccagttaaatgcagactgaatatccgttttgttatgggttaactggcgcggctcgccgccctgtgggctgataagccacagttgcacaatgccgttatcatctcgcattaaaaacgcgatttgtgtaccctgcggattacagcgcacccagtggcgcgggacgttgactaaccccggataagcccgatggtgggtaaaggttaaacgtcgctgcacgacgccacgcggtggcgcgggcagggttgtttccgttccgcttaacggcgcatcacctgccgctttccagccagcttcatcttgcggtaactcaacgataaacagctccggcactttctcgccctttgggctaagtgtgtcgccaataaatgccagcgcgtgatttcctacccatccttcttcataagcacgattgatttcatcactgccaggctgtggcgtgggcgtggttttgctcaccagcacgcaccagtggctaccgctgtattcacgcggatgctgcttttgtacgttgaccgggccaaacggcgcagcaacaccgacgtttcgcaaatccagcgccggatcgagttcatgcattacatggtcgttataggtaaagctcaccctttcaccgttcgggctaaagacatgcacatggctgccgccgcgcagcactcctggcgtatacggcgcggtaatatccatcgcatcaaggttactcatcttgccgccttcaacaatcactccgcgccgatgatggaagtcgtaatgccatgtttcatcaggattttccgggccgtggatgaaaacatatttctcactcttcggatgaacggtcaccacgccgacgtgtgcgccctgactcgcgcgatagataacctcgacctcgccggtatggatattcacacgctcaatggtctcgccggtaaagctcgcgccagaaggacgcacgtcaaataccagccactggctgtcgggcgtccaggtattggtattggtgagcaggtgattacggggagcaaaggttatctgtttcatggcgcggtcctgatacaaaacgggtcccgccatcatacttcacaaggacttcactttcagacaatagtcttttgccatcgtgatgaatgtgagtgaaaagatggaacatttcgacgtggcgattattggcctcggcccggcaggaagcgcgttggcacgaaagttagcaggcaaaatgcaggtgatcgcgctggataaaaagcaccagtgtggtactgaaggtttcagcaaaccctgcggcggtctgctggcaccggacgcgcagcgatcttttattcgcgatgggctgacgcttcctgtcgatgtgatcgctaatccgcagattttcagcgtcaaaaccgtcgacgtcgccgcaagcctcacgcgtaactaccagcgaagctatatcaatattaatcgccatgctttcgacttgtggatgaaaagcctgatccccgccagcgttgaggtttatcacgacagcctgtgccgaaaaatctggcgtgaggatgataaatggcatgtcatttttcgtgcagacggctgggagcaacatattaccgcccgctatctggtcggtgccgatggcgcaaacagcatggtgcggcgacatctctacccggatcatcaaatccgtaaatatgtcgctatccagcagtggttcgcggagaaacatccggtgccgttctactcctgcatctttgataatagcataactaactgttatagttggagtatcagcaaagacggttattttatctttggcggtgcctatccaatgaaagacggtcagacgcgtttcacgacgctgaaagagaaaatgagcgcctttcagttccagtttggtaagacggtgaaaagcgaaaaatgcacggtgctgtttcccagccgctggcaggattttgtctgcggtaaggacaacgcctttctgattggtgaagcggcgggatttatcagcgccagcagcctggaggggattagctatgcgctggatagcacagacattctgcgtagcgtgttactgaagcagccagagaagctcaataccgcttactggcgcgccacccgcaaactgcgtttaaaactcttcggcaagatagtaaaaagccgatgcctgaccgcaccggctttaagaaagtggattatgcgcagtggtgtggcacatattccacagttgaaggattaaccaacgcgcttcacatcgcccaccagcaggatataagagagcgcgccaatcaacgcgacggcggagatataaaccagtgcaggtgcgaaaccgtaaccctgcgccaggtaccccaccaccagcggaacggtgatgccgcccagaccaccggcgaagttaaacacgccgccggttaaaccaatcaggcgcatcggtgccagagaagaaaccaggctccaggtaatgctagcaaaaccgttaccgaagaatgccagcgccatcaggcacataatcatcatcggatcgttagtgtagttagcgcccataatgcaggtggagatcagcaagccgcagataatcggcgttttacgcgcaaagcccagactaaagcccttacgtaccagcagatccgctacccagccagagagcaggacgccgacaaacgccgcgaggaatggcaccgtggtcataaagcctgctttcagcgccgtgattcctttttcctgggttaaatagttcgggaaccaggttaagaaaaaccacagtgtagaagccaccgcaaattgcccaagataaacgccgatcagtttacgatggaacaccagtttccagtctttggctgttaacggctgacgcgcctctttcttcaccggcgcatcaccatccaccagaccgccgccatcacgaatgtaatccagttcagctttgctgatacctttggtcaggcgcggcggctgataaaccttaaaccaaatcaggctccagataatgccgataccaccagtgacaatgaacacccagtgccagctcaacatctcctgaatccagatcagcagcggcgtcagaaacgccagaccgacaaactgaccagacgtataaaaaccaacggcagaagcgcgttcatgttccgggaaccagctggtcaccatccggttattggtcgggaaagcaggcgcttcgaaaataccggttatcgcgcgcagaccaattaaactcattaagcccgtggcaaagccctggaataaagtcgccacactccagccaaatatcgcaataaaataagtcacgcgagaacctacgcgatctaaaaaccaaccgccggggatctgacatagcgtataaagccaggcgaaggcgctaaatacatagcccatttccgctttggtaatgccgaactcttcctgaatatgggcggaagccacggccaggttggcgcggtcgacataacaaatgactaccgtaataaagatcatcaccagcgtcagataacgccgacgccccggctttgctgcattaacgggaatatccatagcgagctttctccagattttgggcatagcgaagccgctcaccatgccctgtaatttacagagggttatatttttgtattgctgttttagtgcccgatgaggggcttacgtggcaggaattaccactctgctacgctgttatcttcatgacgccagagcggattacgccagtccggggcatttttactgaactcaatcactttagcttcgtcgatttccacgcctaagcccggtttcgttaacggtttaaagaagccgccgaccatgctgaagtcttctttgtttttcacaaagtcgagtaactccgcgcctttgttgtaatgaattcccatactttgttcctgaagtacggcgttataggaaacaaagtcgatatgcaggcaagccgccagtgcaatcggtccgagcggacagtgcggcgcaagggtcacgtcataggcttctgccattccggcgattttgtagcattcggtaataccgcccgcgtgggagagatccggttgcagaatgctaataccacctgcctccagcacgcgtttaaaatcgaagcgactgaacatgcgttcacccgccgccagtggaatatgcgtttgtgccgccagtttcgggtagtattcggcttgttccgccagcaccggctcctcaataaacagcgggcgatacggctccagttctttaatcagcactttcgccatcggcgcgctgacgcgaccgtggaaatcaagaccaaactcaatctgattgccaaaagcttcacgaatttgtgccacggtgttaaccgccgcatctaccgcgcgggagttatcaattagccccagttcttcacaaccgttcagtttgaaggtatcgaagccgatttcgcgtagcgttttaatgccgtcgataacatccgccggacgatcgccgccaacccaactgtaggctttaattttgtcgcgaaccaggccgcccatcagttgccagaccggcgcattcagcactttacctttgatatcccataacgcctggtcaatcccggcgatggcgctcatcaggatcggaccgccgcgatagaatccggcgcgatacatcacttgccataagtcattgatgcggcttggatcctgaccaatcaaatagtcacccagctcgtgaactgccgcttccaccgtacgggcgcggccttcgatcacgggctcgccccaaccgaccacgccttcatcggtttcaattttcaggaacatccagcggggaggtaaacgatacgtggtaattttggtgattttcattgcactgcctctcgatacgccttaacaaatgctgctgcctgctgcgcggtgcgctctacggattgcccggcgcgatagagatcgctgcctaagcccgcccctgcacaacctgcgtctatccactgcgccaggttttctggcgtcacgccgccaacggcaaagactgcgatgtcgcttggcaataccgcttttaacgctttgatgtattgcggaccaaaagcgctactcggaaatattttcagcgcctgcgcgcccgcttcgagcgcggtaaaggcttcggtcgccgtcgcgcagccggggcagacggtcatgccgtagcccaccgcacggcggatcacttcactatggatattgggcgtaacgatgagctgacagcccatcctggcgagcgcatcgacctgttcaggtttcagtaccgtacctgcgccaatcaacgccttgtcgccgtacgcatcaacgatggcgggaatgctttgctcccattgtggggaattcagcgggatttcaaccgcgtcgaacccggcgtcaatcaccgcgccaacatgcgccagcgcctcgtcgggcgtaataccgcgcaaaatggcgatcagcgggagtttagtttgccactgcatgagcgatgctccttataccagcctgaaatgccgtgtcgcccgccaccgccgtcacgtcgcaacccatcgcctgaaaggcttgctggtagcgcgcggtcaggcttgttccggcgacaagggtgatggcgtgttgatgggccacatagtcgcgcatactggcgacctctgcgccaatcaacaaaccagagagaaattcgctgacctgttcgcggggaagtgttcccagcacatggctggcgcgaacttcaaaaagctgcggcaatatggcgggcgtattaagaccacgctcaaggccagctgtgaaggcatcggcagagttttcctgcggcggcaaacctgcgccaatcaaactgtgatttaacagtaaatgatgtaattcaccggtcatcacggtgcgaaaatcgttgatttgctggctatcggcctgcacccatttgcaatgggttccgggcatgacataaagagaggaaggagccagagctcgcgcgccgatcaattgtgtttcttcgccgcgcatcacattgtggttatcgtcatgagagacacataatccgggaataatccagatattgtcgccaacactcgttaattgttcgccaatagagctaaaacaggcaggaacagataaatacggtgcaactttccagccgacgttgctgccaaccattcctgccattaccactggcgttttctcttcacgccagtcggtcgtgacttctgctaacaccgcagccggagattttccgttcaggcgcgtgacgcctgcttcactttgcctgctctccaggcagtggtcgccctgataaagccaggcgcgcagattggtgcttccccagtcaattgcgatgtagcgagctgtcatgtgatttcctttaaccttcgtgtgctgctggcgatcatggtaagcgccgcctgctctgccgcatcgccgtcctgatgtcgtatcgcatcgaacagcgccttatgttcctggagcgtttgcggcatgttggcctcatcgcccatccaggttcgttcaaaaaccgcccgctgcaggctactgatcgcaatgctaagttgctgtaacaccgggttatgcacgctctgcagcaccgcctcgtggtagcgaatatccgcttcgttaaacgcttcgcggtcctgattgttggcaatcatctcgttcagcgcgctttcaatctgcgccagatcgctggaagtcgcgcgctctgctgcccaacgggcaatcgccggttccaccagatttcgcacttcgctcatggcactgataagccgtgggtcgtagtcattttccagcacccattgcagtacgtcagtgtcgaggtaattccactggttacgcggtgccacaaacgccccgcgataacgtttcatttcaatcagccgcttcgccatcaggctacggaacacctcacggatgatgttgcggctggttgcaaactcctcacagagttccgcctcagccggaagcgggctgcctggcacgtatttgccgtgaacgatctgtttacccagcgtaatgacaatgcgatcggttttattgagagtcatggagagtccttgtgctctgtatgttcttctctactttaccccgatcgatgcataacgcggcaactttgtagtaccagcgtgatgacgttcgcgtttgccgtgcgtgtaatgtagtacaaacttatattgttgtactacaatttagatcacaaaaagaacaatgcataaaaaaatgacatgcgtcgggcagaaatctgaaaagggatatcaggcgctaaacaggagggaaagaagagtatgctttcaacggcttagctactcgtttaaaggattaatcatgaagttgaattttaagggattttttaaggctgccggtttattcccactggcgctgatgcttagtggctgtatcagctatgctctggtttcccataccgcaaagggtagtagtggaaagtatcaaagccagagtgacaccatcactgggctaagccaggcaaaagatagtaatggaacaaaaggctatgtttttgtaggggaaagcctggattaccttatcactgatggtgccgatgacatcgttaagatgctcaatgatccagcacttaaccggcacaatattcaggttgccgatgacgcaagatttgttttaaatgcggggaaaaagaaatttaccggcacaataagcctttactactactggaataacgaagaagaaaaggcactggcaacgcattatggttttgcctgtggtgttcaacactgtaccaggagtctggaaaacctaaaaggcacaatccatgagaaaaataaaaacatggattacagtaaggtgatggcgttctaccatccatttaaagtgcgattttatgaatactatagtcccagaggcattccggatggtgtttccgcagcattactgccagtgactgttacgctggacatcattactgcaccgctgcaatttctggttgtatatgcagtaaaccaataatcagtaagcgggcaaacgcgtttatgctgtttgcccgcccacagattaattcagcacatacttctcaatagcaaacgccacgccatcttcaaggttagatttggtgacaaagttcgccacttctttcacactaggaatagcgttatccatcgccacaccgacgcctgcatattcaatcattgcgatatcgttttcctgatcgccaatcgccatgatttcttccggtttaatacctaacacgtcggccagacttttcacccccgtacctttgttaacgcgtttatcgaggatttcgaggaagtacggcgcacttttcagcacggtatatttctctttcacttcctgcggaatacgcgcgatagcctggtcgaggatggcgggttcatcaatcatcatcactttcaggaactgggtattggggtccattttctccgcttcgcagaacaccagcggaatggtggcaacgaaggattcatgcaccgtgtagtagctgatatcacggttggcggtgtacagcgtggtgcggtccagggcgtggaaatgagaaccgacttcgcgagagagtttttccaggaaacgatagtcgtcatagctgagagcagtttgcgccacggtgctaccatcagcggccttctgtaccagcgcgccgttataagtaatgcagtagtcgcccggctgttccatatgcagctctttcaggtagttgtgcacacctgcatacgggcgacccgtcgttagcacgacattcacgccacgggcgcgagctgcggcaatcgcatttttaacggcgggactaatggtgtgatcgggcagcagaagggtgccatccatatcgatagcaatgagtttaatagccatgagttccccaggtagattggttcctgacccatgctaacgcgattccgctcaaaaatcagtacaacacccgagggaaaagggggatgcaacgcgcgttgcgtgctccctttttgcttagcggaagagtttccctttcagcagttccatgcctgcggaaagcagatcgttattggcttgtggactcacttcaccttgcggactgagcgcatcaataatcttcggcaattgttctgccagtaaactggaagctgtactggtatccacgccaagtttttgcccgagatcggacaccgcatttgtgccgagcgcgctttccagttgctcgccactaacgctttgattgccctgttgattactcagccaggtactgagaatggcccctaagccgccactttgcagtttttccagcagcacctgaatgccgccctgctcctcaacccaacttaaaatagcctgatatttccccgcatcgcctttcagaaaggcaccgacaacttcatcaaaaagccccatgataatcacctgtaaagcgttacgtgttgacccaaaaagtatagatttgcgggatgataattgcggattgcagaaataaaaagggcggagatgatctccgcccttttcttatagcttcttgccggatgcggcgtgaacgccttatccggcctacaaaatcatgaaaattcaatacattgcaagattttcgtaggcctgataagcgtagcgcatcaggcacgctcgcatggttagcgccattaaatatcgatattcgccgctttcagggcgttctcttcaataaacgcacggcgcggttcaacggcgtcgcccatcagcgtggtgaacaactggtcggcagcaatcgcatctttaacggtaacgcgcagcatacgacgactttccgggtccatagtggtttcccacagctgttccgggttcatctcgcccagacctttataacgctggatggagaggccgcgacgggactctttcaccagccagtccagcgcctgctcgaagctggctaccggctgacgacgctcgccacgttcgataaacgcatcttcttccagcaagccacgcagtttctcacccagcgtgcagatacgacgatattcgccaccggtgataaactcgtgatccagcggatagtcagtatccacaccgtgggtacgcacgcgaacaatcggctcgaacaggttttgctcagcattggtgtgaacatcaaacttccactggctgccgtgctgttctttgtcgttcagttcgctgaccagcgcgttcacccagcgggtaacggtctgctcatcagaaaggtcagcttccgtcaacgtcggctgatagataagctctttcagcattgctttcggataacgacgctccatacgattgatcattttctgcgtcgcgttgtactcagataccagtttctctaacgcttcgccagccaatgccggtgcactggcgttggtgtgcagcgttgcgccgtccagcgcgatagagatctggtactgatccatcgcttcgtcgtctttaatgtactgttcctgcttgcctttcttcactttgtacagcggcggctgagcgatgtagacgtgaccgcgttcaacgatttccggcatctgacgatagaagaaggtcaacagcagcgtacgaatgtggctgccgtcgacgtccgcatcggtcatgatgatgatgctgtgataacgcagtttgtccgggttgtactcgtcacgaccgataccacagccaagcgcggtgataagcgtcgccacttcctgagaagagagcatcttatcgaagcgcgctttctcgacgttgaggattttacccttcagcggcagaatcgcctggttcttgcggttacgcccctgcttcgcagagccgcccgcggagtccccttccaccaggtacagttcggaaagcgccggatcgcgttcctggcagtctgccagtttgcccggcaggcccgctaagtcgagcgcacctttacggcgggtcatttcacgcgcgcgacgcgccgcttcacgggcacgggcagcatcgataattttgccaaccacgattttcgcgtcggttgggttttccagcaggtattctgccagcagttcgttcatctgctgttcaaccgcgcttttcacctcagaagaaaccagtttgtctttggtctgggaggagaatttcgggtccggcactttcacggaaacgaccgcaatcaggccttcacgcgcatcgtcaccggtggcgctgactttggcttttttgctgtagccttctttgtccatgtaggcgttcagggtacgggtcatcgccgcacggaagcctgccaggtgagtaccgccgtcacgctgcggaatgttgttggtaaagcagtagatgttttcctggaagccatcgttccactgcaacgccacttcgacgccaataccgtctttttcagtggagaagtagaagatattcgggtggatcggcgttttgttcttgttcagatattcaacgaacgccttgatgccgccttcatagtggaagtggtcttctttgccgtcgcgcttgtcgcgcagacgaatggaaacgccggagttgaggaagctcaactcacgcagacgtttcgccagaatttcatattcgaactcggtcacattggtgaaggtttcgaggctgggccagaaacgcaccatggtgccggttttttcagtctcgccggtaaccgccagcggggcctgcggtacaccgtgttcgtagatctgacggtgaattttaccctcgcgctggataaccagctccagtttttggctcagggcgtttactacgctaacaccaacgccgtgcagaccgccggacactttataggagttatcgtcaaatttaccgcctgcgtgcagaacggtcatgatcacttccgccgcgcttacgccctcttccgggtgaataccggtcggaatgccgcgcccgtcatcctgtacagagacagagttatcggcgtgaatggtgacgataatttctttacagtgacccgcgagcgcttcgtcgatagcgttatctaccacctcgaataccatgtggtgcagaccggtgccgtcatccgtgtcgccgatatacatacccgggcgcttacgcaccgcatccagccctttcaggactttgatactggaggagtcataagaattgctcatcaacgtttctcgctcatttatacttgggttaatccgttattttacccttttccacggtaaacatcttgctattttcgtcgctcatgtctataacgtgttcagcactgatcgcgctgacaaagacctgactttgcgtcgcttttaagcggctggcaagcagcccgcgacgctcatcatcaagctcagaggcaaaatcatctatcaggtagagacaccgccgcccgctttcacgggtgaggaactctccttgcgccagacgtaaggcgcacatcaacagcttaagctgcccacggcttaaggtatcttccaccggcgcaccgtcggcgcgaatgcgtaagtccgctttgtgcgggccgtgcgcggtgtaggttagctggcgatcgcgttcaaaattacgttccagcacctcagcatattctgtctctttctcccagccgcgctggaaagagaaagtcagagaaaactcagggagaaattgcttacaggtatcagccatatcggccgcgataccggcgctatactccgcgcgccaggtgctgatttgctccgccagcgggatcagctctttatcccacgggcgtagctgttcgtaacgtgtcacctggcgcagcgccgcattgcgctgcttgagcaatcgcttgagattgctccaggcggtgaaaaatccgggttcgttgtgaaagcatccccagtcgaggaatgctcttctgtatttggggccgccgttgagtaaagtaaacccttctggcgttatcaactgcattggcatcaggtgcgccagttccgcgaccttatgcccgtctgtaccgtcgatgcggactttgctgtcgccctgtttgtctttggttaagccaatcgctgtctcgcgctcttcgccctgtaatcgcccgtggagaacaaacgcctcctgctcatggcgaatgacgcgaccaatctgcaaactgcgaaacgcccgaccatggccgagcgtatagatggcttccagcacgctggttttgccactgccgttggcacctaccagaaagttaaagccgggagataaggcgagatccgcggtttcaatgttgcggaaatcgcggatcaacaagcgggtgagggacattacagtctcattggcatgacaacataagccgcgctctggctggccgcatcttcaatctgcacgctggaaacgctatcggtcagcatcatgcggacgttttcgcatttcagcgcgttcagaacatccagcacataactgacgttgaagccgatttccatctccgcaccgctataggtaacgtcgaggatctcttccgcttcttcctgttccgggttgttggcggtgattttcagctggttttcgctgacataaagacgtacgccgcggaatttctcgttagagagaatcgccgcgcgagcaaacgcctgcttgagcagatcgcagccagcttccagatgtttgtccgggttcttcggcagaacgcggcgataatccgggaagcgaccatccaccagtttggaggtgaagataaagtcgccaacgtgggcgcgaatgttgttgctgccaatctgtacgcgcagcggattgtcgccgccgtcgagcatacgcatcagttcaatcacgcctttacgcggtacgatcacgctatggcttggcaaagattgaccaattggcatactacagaccgccagacggtggccgtcggttgccacggtgcgcagttcttcaccttcggtttcaaacagcataccatttaagtaatagcgaacgtcctgatgcgccatagaaaactgggtcgcttcaatcagacgcttcatcgttgcctgcggcagggtaaattcgacttcactctgccagtcatcgaggttcgggaaatccgccgctggcagggtagacaggctaaaacggctacgcccggagcgtaccagcatccgttcaccttccagctgcacggcaatttccgcgccttcaggcagaccacggcagatatcaaagaatttgcgcgccggaacggtcgtcgctcctggctcgtgtggctgaaccagcgcaacacgtgccaccatttccatctcgagatcagtaccggtcaggctcaacgtaccgtcagcaacctgtaacagcagattaccgagaatcggtagcgtaggacgaccacctaacggaccgctcacctgttgtagcggttttaataaatgctcacgttctacggtaaatttcataggtttagctactcaatgttctgattaaattactaaaatcttctttgatatcgtggctctcttcacgcaactgctcgatcttacggcaggcatgaagcaccgtcgtgtggtcacggccaccaaacgcatcgccaatctccggcagactgtggttagtcagctctttcgccagcgccatcgccatctggcgcggacgcgccacgctgcgggatcgacgcttggaaaggagatccgcgactttgatcttgtagtactccgccaccgtcttctgaatattgtcgatggtgaccagtttttcctgcaatgccagcaagtcgcgcagcgcctcacgcacgaagtcgatggtgatcgcccgtccggtaaagttggcattggcaatgacgcggttcagcgccccttccagctcacgtacgttagatcgtagacgcttggcgataaagaacgccacttcgcccggcaaacgaatgtcgttttcgtcggcctttttcatcaggatcgccacacgggtttccagctctggcggttcgatcgccacagtcagtccccaaccgaagcgggatttcaaacgatcctcaacgccgttgatctctttcggatagcgatcgctggtgagaatgatctgttgattaccttccagcagggcgttgaaggtgtggaaaaactcttcctgagatcgttctttattagcaaaaaactgaatatcgtcgatcagcagtgcatctacggaacggtagtagcgtttaaactcttcgatcgcgttgttttgcagggctttaaccatgtcctgaacaaagcgctcggagtgcatataaaccactttggcattcggcttgcgcgccataatgccgttacccaccgcatgcagcaggtgagttttacccagacccgtgccgccataaaggaacaacgggttataggcaccgccagggttatccgccacctggcgagccgccgcgcgcgccagttggttagatttaccttcaacgaagttatcaaacgtgtgtttgacgtttacgttagaacgataggtcggttctgccggggccgggacgttatcccaaccactgcgcgtagaaggcgcagcacgttgcggctgcgtttgcgccacctgtgcaggggccgcgacgttgctcgtcactgccgcttgtggcgtttgcgtcaccggtttggtgccgacttcaaaacgcagctgtggggcatccgctccgcagaaactggttagcagtccattgatattattaaggtacttgtcccgtacccaatcgaggacaaaacggtttggcgcgtacagggccagcgtgttatcgctcagttccgcctgcaatgggcgtatccacatactgaattctgtggctggtaactcatcctgcaatcgggcaagacactgctgccaaaggctaagactcacggcggactccactcgaacaaaagtcgataatgactaaggctgaaacattcatgattgttgacgtacgtcgaaaagaccctgcttgagggtgacgcacgaaccgctgtctgcggttatatgcccgatcaagatcctgcaaaacgatcgggaccgcggatcatagcctaaactgcgcaagagatcttctgtttctcacagattttcccgatttatccacaggactttccagaactcgctaagtgtaaacgatcctgccgcgaggcgggcacgatttacgccgcatattggaaaatttaatgaccatagacaaaaattggcttaatcgatctaataaagatccaggacgatccttgcgctttacccatcagcccgtataatcctccacccggcgcgccatgctggtttccactggtgtgaggtcgtacattttccctgcgaaaaggtgcggaaaagcgcggtaaataaggaaagagaattgactccggagtgtacaattattacaatccggcctctttaatcacccatggcttcggtgtccatcgtttcatttttcggcggatatccaataaagccattgaatttattcaagtttaggtagaaatcgccatgaaacgcacttttcaaccgtctgtactgaagcgcaaccgttctcacggcttccgtgctcgtatggctactaaaaatggtcgtcaggttctggcacgtcgtcgtgctaaaggccgcgctcgtctgaccgtttctaagtaataaagctaacccctgagtggttaagctcgcatttcccagggagttacgcttgttaactcccagtcaattcacattcgtcttccagcagccacaacgggctggcacgccgcaaattaccattctcggccgcctgaatagcctggggcatccccgtatcggtcttacagtcgccaagaaaaacgttcgacgcgcccatgaacgcaatcggattaaacgtctgacgcgtgaaagcttccgtctgcgccaacatgaactcccggctatggatttcgtggtggtggcgaaaaaaggggttgccgacctcgataaccgtgctctcagcgaagcgttggaaaaattatggcgccgccactgtcgcctggctcgcgggtcctgacttaatcggaagcgttggaaaaattatggcgccgccactgagccctggcagccgggtcctgatagccctcattcgggtctatcaacgcctgattagtccgctactcgggccgcattgtcgtttcactccaacctgtagtagctacggaattgaggcattgcgcaggtttggagtgataaaaggcagttggttgacggtgaaacgcgtattaaaatgccaccctttacaccctggtggtgacgatcccgtcccgcccggaccatttgataccagagaacactaacgatggatagccaacgcaatcttttagtcatcgctttgctgttcgtgtctttcatgatctggcaagcctgggagcaggataaaaacccgcaacctcaggcccaacagaccacgcagacaacgaccaccgcagcgggtagcgccgccgaccagggcgtaccggccagtggccaggggaaactgatcagcgttaagaccgacgtgcttgatctgaccatcaacacccgtggtggtgatgttgagcaagctctgctgcctgcttacccgaaagagctgaactctacccagccgttccagctgttggaaactagtccgcagtttatttatcaggcacagagcggtctgaccggtcgtgatggcccggataacccggctaacggcccgcgtccgctgtataacgttgaaaaagacgcttatgtgctggctgaaggtcaaaacgaactgcaggtgccgatgacgtataccgacgcggcaggcaacacgtttaccaaaacgtttgtcctgaaacgtggtgattacgctgtcaacgtcaactacaacgtgcagaacgctggcgagaaaccgctggaaatctccagctttggtcagttgaagcaatccatcactctgccaccgcatctcgataccggaagcagcaacttcgcactgcacaccttccgtggcgcggcgtactccacgcctgacgagaagtatgagaaatacaagttcgataccattgccgataacgaaaacctgaacatctctagcaaaggtggttgggtggcgatgctgcaacagtatttcgcgacggcgtggatcccgcataacgacggtaccaacaacttctataccgctaatctgggtaacggcatcgccgctatcggctataaatctcagccggtactggttcagcctggtcagactggcgcgatgaacagcaccctgtgggttggcccggaaatccaggacaaaatggcagctgttgctccgcacctggatctgaccgttgattacggttggttgtggttcatctctcagccgctgttcaaactgctgaaatggatccatagctttgtgggtaactggggcttctccattatcatcatcacctttatcgttcgtggcatcatgtacccgctgaccaaagcgcagtacacctccatggcgaagatgcgtatgttgcagccgaagattcaggcaatgcgtgagcgtctgggcgatgacaaacagcgtatcagccaggaaatgatggcgctgtacaaagctgagaaggttaacccgctgggcggctgcttcccgctgctgatccagatgccaatcttcctggcgttgtactacatgctgatgggttccgttgaactgcgtcaggcaccgtttgcactgtggatccacgacctgagcgcacaggacccgtactacatcctgccgatcctgatgggcgtaacgatgttcttcattcagaagatgagcccgaccacagtgaccgacccgatgcagcagaagatcatgacctttatgccggtcatcttcaccgtgttcttcctgtggttcccgagtggtctggtgctgtactatatcgtcagcaacctggtaaccattattcagcagcagctgatttaccgtggtctggaaaaacgtggcctgcatagccgcgagaagaaaaaatcctgattcggtgagttttcgctaaaataagggcggtcagttgaccgccttttttcttttcgtagggcggataagcaccgcgcatccgccacacaaagcaacaggaacatcatgagcgataatgacactatcgtagcccaggccacgcctccgggacgtggcggcgttggcatcctgcgcatctccggcttcaaagcccgtgaagttgccgaaaccgtgctgggtaaactgcctaagccgcgctacgccgattatcttccgtttaaagacgccgacggcagcgtgctcgatcaggggattgcgctatggttccctggcccgaacagcttcaccggcgaagatgtgctggaactgcaaggtcatggcggtccggtgatcctcgacctgctgttaaaacgcattctgaccattcccggcctgcggattgctcgccctggtgagttttccgaacgcgcgtttcttaacgataaacttgacttagcccaggccgaggcgattgccgatcttatcgacgccagtagcgaacaggcggcccgtagcgcacttaacagcctgcaaggcgcattctccgcacgggttaatcatctggtagaagccctcacccacttgcgcatttacgtcgaagcggcaattgatttccccgatgaagagatcgatttcctctccgacggaaaaattgaagcccagctcaatgacgttattgccgatcttgatgcagtgcgtgctgaagcacgtcagggtagtttgttgcgcgaagggatgaaagtggtgattgccggacgtcctaacgccggtaaaagcagcctgttaaacgcgctggcggggcgtgaagcggcaatcgtaaccgatatcgccggaactacgcgtgacgtgctgcgtgagcatatccacattgacggaatgccgctgcatatcatcgataccgccgggctacgtgaagccagtgacgaagtagaacgtattggtatcgagcgcgcgtggcaggaaattgaacaggccgaccgcgtgctgtttatggtcgatggcaccacaacagacgccgtggatccggcagagatctggccggaatttattgcccgtctgccagcgaaactgccgatcaccgtggtgcgcaataaagccgatatcaccggcgaaacgctgggaatgagtgaagtgaacggtcacgcgttaattcgtctcagcgcaaggactggtgaaggcgtggacgtgctgcgtaaccatctcaaacagagcatgggctttgacaccaacatggaaggcggcttcctggcgcgtcgtcgccacctacaggcgctggaacaggcagcggaacatctacaacagggcaaagcgcaactgttgggagcctgggcaggtgaactgctggcggaagagttgcgtctggcacagcagaacttaagcgaaatcaccggggaatttactagtgacgacctgctggggcggattttctccagcttctgtattggtaagtaaccgcgcttacgaggccgcattctgactgtcagatgcggcttcgcttcattgttaccactcctgttattcctcaaccctttttttaaacattaaaattcttacgtaatttataatctttaaaaaaagcatttaatattgctccccgaacgattgtgattcgattcacatttaaacaatttcagaatagacaaaaactctgagtgtaataatgtagcctcgtgtcttgcgaggataagtgcattatgaatatcttacatatatgtgtgaccagtaaatggttcaatattgacaacaaaattgtcgatcaccgcccttgatttgcccttctgtagccatcaccagagccaaaccgattagattcaatgtgatctatttgtttgctatatcttaattttgccttttgcaaaggtcatctctcgtttatttacttgttttagtaaatgatggtgcttgcatatatatctggcgaattaatcggtatagcagatgtaatattcacagggatcactgtaattaaaataaatgaaggattatgtaatggaaaactttaaacatctccctgaaccgttccgcattcgtgttattgagccagtaaaacgtaccactcgcgcttatcgtgaagaggcaattattaaatccggtatgaacccgttcctgctggatagcgaagatgtttttatcgatttactgaccgacagcggcaccggggcggtgacgcagagcatgcaggctgcgatgatgcgcggcgacgaagcctacagcggcagtcgtagctactatgcgttagccgagagtgtgaaaaatatctttggttatcaatacaccattccgactcaccagggccgtggcgcagagcaaatctatattccggtactgattaaaaaacgcgagcaggaaaaaggcctggatcgcagcaaaatggtggcgttctctaactatttctttgataccacgcagggccatagccagatcaacggctgtaccgtgcgtaacgtctatatcaaagaagccttcgatacgggcgtgcgttacgactttaaaggcaactttgaccttgagggattagaacgcggtattgaagaagttggtccgaataacgtgccgtatatcgttgcaaccatcaccagtaactctgcaggtggtcagccggttagtctggcaaacttaaaagcgatgtacagcatcgcgaagaaatacgatattccggtggtaatggactccgcgcgctttgctgaaaacgcctatttcatcaagcagcgtgaagcagaatacaaagactggaccatcgagcagatcacccgcgaaacctacaaatatgccgatatgctggcgatgtccgccaagaaagatgcgatggtgccgatgggcggcctgctgtgcatgaaagacgacagcttctttgatgtgtacaccgagtgcagaaccctttgcgtggtgcaggaaggcttcccgacatatggcggcctggaaggcggcgcgatggagcgtctggcggtaggtctgtatgacggcatgaatctcgactggctggcttatcgtatcgcgcaggtacagtatctggtcgatggtctggaagagattggcgttgtctgccagcaggcgggcggtcacgcggcattcgttgatgccggtaaactgttgccgcatatcccggcagaccagttcccggcacaggcgctggcctgcgagctgtataaagtcgccggtatccgtgcggtagaaattggctctttcctgttaggccgcgatccgaaaaccggtaaacaactgccatgcccggctgaactgctgcgtttaaccattccgcgcgcaacatatactcaaacacatatggacttcattattgaagcctttaaacatgtgaaagagaacgcggcgaatattaaaggattaacctttacgtacgaaccgaaagtattgcgtcacttcaccgcaaaacttaaagaagtttaattaatactacagagtggctataaggatgttagccactctcttaccctacatcctcaataacaaaaatagccttcctctaaaggtggcatcatgactgatcaagctgaaaaaaagcactctgcattttggggtgttatggttatagcaggtacagtaattggtggaggtatgtttgctttacctgttgatcttgccggtgcctggtttttctggggtgcctttatccttatcattgcctggtttagtatgcttcattccgggttattgttattagaagcaaatttaaattatcccgtcggctccagttttaacaccatcaccaaagatttaatcggtaacacctggaacattatcagcggtattaccgttgccttcgttctctatatcctcacttatgcctatatctctgctaatggtgcgatcattagtgaaacgataagtatgaatttgggttatcacgctaatccacgtattgtcgggatctgcacagccattttcgttgccagcgtattgtggttaagtagcttagccgccagtcgtattaccagtttgttcctcgggctgaagattatctcctttgtgatcgtgtttggttcttttttcttccaggtcgattactccattctgcgcgacgccaccagctccactgcgggaacgtcttacttcccgtatatctttatggctttgccggtgtgtctggcgagttttggtttccacggcaatattcccagcctgattatttgctatggaaaacgcaaagataagttaatcaaaagcgtggtatttggtagcctgctggcgctggtgatttatctcttctggctctattgcaccatggggaatattccgcgagaaagctttaaggcgattatctccagtggcggcaacgttgatagcctggtgaaaagcttcctcggcaccaaacagcacggcattatcgagttttgcctgctggtgttctctaacttagctgttgccagtagcttctttggtgtcacgctggggttgttcgattatctggcggacctgtttaagattgataactcccacggcgggcgtttcaaaaccgtgctgttaaccttcctgccacctgcgttgttgtatctgatcttcccgaacggctttatttacgggatcggcggtgccgggctgtgcgccaccatctgggcggtcattattcccgcagtgcttgcaatcaaagctcgcaagaagtttcccaatcagatgttcacggtctggggcggcaatcttattccggcgattgtcattctctttggtataaccgtgattttgtgctggttcggcaacgtctttaacgtgttacctaaatttggctaaatccttcaagaagccagccattcgctggcttcttgcctctcaggaaatcacttatgtccaaatggcaactcgcctgatcctccttcaccacgtatgctttgcgtcaccttactatcaggacgctttagcccatgtcccgctttttgatttgtagttttgccctggttttactttatcccgccgggattgatatgtacctcgttggtttaccgcgcatcgccgccgatctcaatgccagcgaagcgcagttgcatattgcgttctccgtatatctggcggggatggcagctgcgatgttatttgccggtaaagtggccgatcgtagtgggagaaagccggtcgccatacccggcgcggcgctatttattattgccagcgtgttctgtagtctggctgaaaccagcacgttatttcttgcaggccgatttctacaggggttgggcgcaggctgttgttacgtagtggcgttcgctattttgcgcgacacgctggatgatcgacgtcgggctaaagtgctgagtttactcaacggtattacctgcatcattccggtgttagcgccagtgctcggacatctgattatgcttaaattcccgtggcagagtctgttctgggcgatggcaatgatgggcatcgcggtactgatgttgtctttgtttattttaaaagaaacgcgcccagcggcccccgcagctagcgataaaccacgagaaaatagcgagagcctgcttaaccgttttttcctcagccgtgttgttatcaccaccctcagcgttagcgtgatcctcactttcgtcaacacgagtccggtattgctgatggaaatcatggggtttgagcgcggtgaatacgccaccattatggcgctgaccgctggcgtcagcatgaccgttagtttctccacgccatttgcgctgggaatttttaagccacgtacgttgatgatcaccagccaggtgttattcctggcggcggggatcactcttgccgttagtccttcccatgcggtttctctgtttggtatcacgctgatttgcgccggtttcagcgtaggttttggtgtggcgatgagtcaggcgttagggccgtttagtttacgcgcgggcgtagccagcagcaccttaggtattgcgcaggtttgcggtagcagtctgtggatttggctggcagcggtggttggtatcggcgcatggaatatgctgatcgggattctgattgcctgtagcatagtgagcctgttgctgattatgttcgtcgcgcctggacgccccgttgccgctcatgaagaaatccatcaccacgcttgatctcaatctgctgctttgtctgcaactgctgatgcaggagcgcagcgtaaccaaagcggcgaagcggataaacgtgacacctagcgcggtgagtaagagcctggcaaagttaagagcgtggtttgacgacccgctctttgtgaacagtccgctgggtctgagccccacaccgctgatggtcagcatggagcaaaatctggcggagtggatgcaaatgagcaacctgctgctggataaaccgcaccaccagacaccgcgcggcctgaagtttgagctggcggcggaaagtccgctgatgatgatcatgcttaatgcgctgagcaaacagatctaccaacgttacccgcaggcgaccatcaaattacgtaactgggattacgattccttagatgccattactcgtggtgaagtggatatcggtttttccggtcgcgaaagccatcctcgcagccgggagctgttaagcagcctaccgttagccattgattatgaagtgctgtttagtgatgtgccctgcgtctggttacgcaaagatcatccggcactgcatcaaacgtggaatctggacaccttcttacgttatccgcatatcagcatttgctgggaacagagcgatacctgggcgctggacaatgtgttacaggagctgggacgcgaacgcacgattgctatgagcctgccggaattcgagcagagtctgtttatggcagcgcaacccgacaatctgctactggcgaccgcgccgcgctactgtcagtactacaatcaactccatcaactgccgttggttgctcttcctctcccgtttgacgaaagccagcaaaaaaagctggaagttccttttaccctgctgtggcataaacggaacagccataatccgaagatcgtctggttacgggaaaccattaaaaacctttacgcgagcatggcataaccgaatcgtatgaaacgcgacccaatttcacaataaaatgtaaaaaagttgtaataagcttgtctgaatcgaacttttagccgctttagtctgtccatcattccagtaaatgattactcttgtattcataatggaccattaagcatggagcgaaaaatggcgactcactttgcccgagggattttaacggaaggacatctgatttctgttcgtctcccctcccagtgtcatcaagaagcccgaaacattccccctcatcgtcaaagccgttttctggcgtccagaggtttactcgcagaactgatgttcatgctgtatggcattggcgaattgccggaaatcgtcaccctgccgaaaggtaaaccggttttcagtgataaaaatttgcctagcttttccatttcctatgccgggaatatggttggcgtggcgttaacaaccgaaggtgaatgtggcctcgatatggaactacagcgtgcgacgcgcgggtttcatagcccacacgcgcccgataaccacaccttttccagcaatgaaagcctatggatcagtaaacaaaacgatcctaacgaagcgcgggcgcagctcatcacgctgcgccgaagcgtgctaaaactaaccggtgatgttttgaatgacgatccgcgcgatctgcagctgctgcccattgccggacgcctgaaatgtgctcatgtaaatcatgtagaagcgttatgcgacgcggaagacgtgctggtgtggtccgtggcggtcacgcccacgattgaaaagctcagtgtctgggagttagatggcaaacacggctggaaaagcctgccggatattcacagccgcgccaacaatcctaccagccggatgatgcgttttgcccaactctctaccgtgaaggcttttagcccaaattgatagacaaccacaggagtcatcatgtctgaaaaattgcaggtggttacgttactggggagcctgcgcaaaggcagttttaatggcatggttgcacgtaccctgccgaaaattgctccggcgagcatggaagtcaatgcgttaccatccattgccgacattcccttgtatgacgctgacgtacagcaggaagaaggttttccagcaacggttgaagctctggcggaacagatccgtcaggctgacggtgtggtgatcgtcacgccggaatataactacagcgtaccgggtgggctgaaaaatgccatcgactggctttcccgcctgccggatcaaccgctggccggtaaaccggtattgattcagaccagcagtatgggcgtgattggcggcgcgcgctgtcagtatcacctgcgccagattctggttttcctcgatgcaatggtgatgaacaagccggaatttatgggcggcgtgattcagaacaaagttgatccgcaaaccggagaagtgattgatcagggtacgctggaccacctgaccgggcaattgaccgcatttggtgagtttattcagcgagttaagatctaaataaaaaacccgccagcaatcatgcatggcgggtttttaacgcgctatcgattttagtgagcgtcgataaagacaatcttcaggataaacagcagcgcaacgatgattacgcacgggcttagatcacgcagacgtccggtaccgattttcatcacgcagtaggagataaagcccagcgcgataccttcggtaatgctgaagctgaacggcatcatcacggcggtaataaacgccggaacagattcagtaagatcctgccagttcacgcgtgccagactggaagtcatcagcacgccaacgtaaatcagcgcaccagctgcagcgtagcctggcaccatccccgccagcgggctcagaaagataaccagcaggaacagcagaccaacaaccactgccgtcagaccggtacgaccgccaacgcttacgccggaagaggactcaatataagccgtaacggaagaagtaccgataaagctaccggtcacggaagagatactgtcgacatacagcgcctgcttcatgcgcgggaatttccccttctcatccgccagacctgctttatcggtcacgccaatcagcgtaccggaggagtcaaacaagttgaccaacatgaaagagaaaatcacccctgccagcccgaggttaaagctcccggctaaatctacatgacccacaactgtcattacgctcggcggcgcagaaacgatgccattgtagtgcacatcacccagcatccagcccagcagcgtcgtcaccacgatagaaaccagcaccgctgcgtgaatgttgcggctggccagaatagcaatgatgaagaagccgaggatacccagaagtacgctgtgagaagtcagattaccgatgctcaccagcgtttccgggttagcgacaatcacacctgcgtttttcagccccatcatgccaatgaacagaccgataccgctggtaatacccacacgcagactcaccggaatgttggctatcatccagtagcgaacgcggaaaatcgtcagtaacagcagacctatcgcgccccagaagattgcgcccatcccgacctgccacggcaagcccatcgcctgtacaacgacaaaagcgaagaacgcattcaggcccatagcgggtgccagtgcaactggcaggttagcaaacagtcccatcataatactgccgaatgcagcgatcagacaggtagtgacgaagacggcgctggtatccatgccagcaacgccaagaatttgcgggttaacaaaaacgatgtaaaccatcgtcaggaaggtggtaaaaccggcgatcacttcggtccgtgccgtcgtgccatgttcgcgcagtttaaacacgcgttccagcatcccctgaccagaagtctgggtggtatgttgatgactcattatctatttccgaacaaggagggaaaatccgtcgctatcgtataccaaaatgcgacaataggcgcgtttgtgagagacttttttattggatttacttatacggcaacgattgcgttgcgcaaatcggctctacgaaaacgttaaactgattaaaaaggaaaggcatgtcccggatagaagcggtatttttcgactgcgacggtacgctggtcgacagtgaagtcatttgctctcgcgcatatgtaacgatgtttcaggaatttggtattacgctcgatcctgaagaggtattcaaacgtttcaaaggtgtaaaactgtacgaaattatcgatattgtttcccttgaacatggtgttacgttagcgaaaacagaagctgaacacgtttaccgtgcagaagtcgctcggctgttcgatagtgaactggaagccatcgaaggggctggagcgctcctgagtgcgatcactgcgccaatgtgtgtggtatctaacggcccaaataacaaaatgcagcattctatgggcaagctgaatatgttgcactacttcccggataaactgttcagcggctacgatattcagcgctggaagccagacccggcgttaatgttccatgcggcaaaagcgatgaatgtaaatgtagaaaactgcattctggttgatgacagtgttgccggtgcacaatctggtatcgacgcaggtatggaagtgttctacttctgcgccgacccgcacaataagccgatcgttcacccgaaagtcaccacctttacccatcttagccagttacctgaactgtggaaagcgcgtggttgggatattacggcataattcttcacactcccttcacttaccccgcttaaattggcgctcaaaggtaagtaaagggagtttgatatgtctgttagtcgtcgggtaatacatcacggactttattttgcagttttaggaccgttaattggtgttctgtttcttgtcctctacatattcttcgcaaaagaaccgctggttctttgggtgataatacatccaatttttctcttattgagcataactacgggagctattcctgcgttgttaaccggtgtaatggttgcctgtctgccggaaaagatcgggagtcagaaacgttatcgttgtctggctggtggcataggtggcgtcgttatcaccgagatctattgtgcagttattgtacatattaagggcatggcttccagcgagttgtttgaaaacattctttctggtgacagtctcgttgtccgcatcattcctgcattgctggcaggtgtggtgatgagcagaatcattacccgtctacccggattggatattagttgtcctgaaacagactctttaagttaagcgggatactttatctttgggctactcaaaagcagacaggatgtttctatgactcaaaatatcaggccgttaccccaattcaaatatcatcccaagccactggaaacaggcgcatttgaacaggataaaaccgtagagtgcgattgctgtgaacaacagacgagtgtttattacagcggtcccttttattgcgttgatgaagttgaacatctctgtccgtggtgtattgcggacggttctgctgctgaaaagtttgcaggtagttttcaggatgatgccagcatagaaggtgttgaatttgagtatgatgaagaggacgaatttgccggtattaagaacacatatcctgatgaaatgctgaaagagttggttgaacgcacgccaggttatcatggatggcagcaggaattctggctcgcgcattgtggcgatttctgtgtttttatcggctatgtgggctggaatgatataaaagatcgcctcgatgaatttgccaaccttgaagaagattgtgagaatttcggtattagaaattctgatctagctaaatgcctgcaaaagggtggtcattgtcagggttatctcttccgctgtctccactgcggcaagctgagactgtggggtgattttagctaattatttaaataatgagaacaggccggagcgtaattcacacatccggccttatttcttaagcttaaccgagtgctaattctgcggcagcggctttatcagcgattaccatcaggctaggatgcagctgcaacacggaagctggaacatcttcggtaaccggaccttgcagaacatttttcagtgcctgcgctttacccgcgccgctgacaattatcagcaagtttttcgccgccatgatgcttttcggccccatcgtcacgtagctgtcaggcactaagctaaagtcgccgcccaactcgccatgcgccacaatatcaaccatctctccctggatcgggaactccacggtttgctcatggaaatgggtcgtattcggcaaattgccacaaaaatgaccatctgcacctaatcccagcaccaccaaatccagtccgccttcacgcgccagtttctgatcatgctcgcggtagttatcaatagtgagcttctggatattctcttctttgatccccgcaggggtgaaaaacagattacgcagattggtaatcgttacgccttctccctctttgccgcgaaatggaatttcatcaaaattatagaaatagcagttatcgtaccagggcttacctttaaccagggtggtgaggtattcatacatgcctttgggcgtgctaccggcggtaattgccaggttaacacgacgcgtcttgctcatataaccaagcagatggtgtgccgcgacacggctcatttcctggtaatcttcggtaatgattaatttcatcttaatgccttattttatttaaataatttctgtacaaaggctgcataggctggtcgccagacatccatttcatggttcagacccggatattcctggtaatcaaagttaatttttttctgctcaagctcagttttcagcccggcgatatccttgccggttacgacatctttatcccccacaaccacagtaaaattacgtagttgctggttgatagctgccggatcgttcagtcgggccgcgacaccttcatccggtacggttgtcgtggtaacaccactgaatgtggccagccagccaaagctttccagatgattcattccggaaaccagcgcctggtacccgccttgactaagccctgccagcgcgcggccatcggcatctttacggacattaaaacgcttgctaatcagcgggataatatcgttcatcagttcgcgatctgccgctttagcattcagcggataaaagactttacgtctttcctgaggcacgaaatcttcgggaataatgcccttcgcatcggtttctgtatccgggatcaccaccagcatcggtttaattttcccttcagcaagcaggttatccatgatttgcgggatacgcccctgatcgatagcggaacgtccggtatcaccaaagccgtgatagaaatagagcactggcaaaggctcgcccatgccggtgtatcctggcggggtccagacatacatctgacgttcagattgcaatgcgttggagtggtaagttatggcgatcaaatcaccatgcgcaacagaacgcgtatccagataactgcctggcaccagaatcatactggagttaacctggcgctgaggattagtcattgcggtgcctgtatcaatgctgcgtacaccatcaacattgaaaaaatactcgtacaggttgcctttcaggataggtgtgcgccagctccagactcctgcttcgtctttggtcatcgggtgaatattgtccggaaccggaacacccaccactacagagacattttttgccccaggggcaaagtagcgaaaggtcacgctgttatcggcattgacctgagtcacatactgtttcaccgggatagtgggtgccgggctggctggcatatccgctgctatggcccactgagcagaaataccgctggcaatagccagcgttaaagcagcaatttttatattcatcgtaatattcctttcattaagttccattaccaccagatttcagcctgggcaccgacagcaaactggtcgtctttattgtcttcaaaggtgaagccatccagttcgttttccagggctttgatatacgtggcgtagaaacgaatttccggacggctggtcaacatactggtattgactttaaaggtatggaagagcgtggttttataaccagactcattaaatttattactattcgcatctttgttttgctgggtgaaatagcccagttcaacacctgtctggttatattggtcccaaatataggccgggcgaacaaccgcacgaatagattcgaaatcagagtgggcgcctgtttcgtagctatatatatcgttaccgaaggagtaaacaatcgcgttagctacaatgaaatgatcgccaatataggcttcgccctggctagtcagacgtaccgctgttccgccggtgtgatcaccataataacgaccattaaaggtggtaaatggacttgcgccagcataacggccaaagttactggcgatagagttattcgcgaccaggaaggagaattcgttgaagccacctttatcaaatttctgcgttaaagatgtgccaaacatccaggtatctttccagtcataatacccgttattatcctgattatctttttcgcttgcgctttcgtttgccgtgacataacgaccacttaccattaaggtggctttatcccataacgggatatctttatagcgtaaatcaatggtattggtattaatctgctgtttgttttgcaggctgcgatcgtaatcatcgacatcttcgcgaaccagcgcgatatcaattttacccggaccgactttccagttttccagacctacacccgctgcggcatcagtacgctgcgttttccagtcaagcatctggatttcaattttcggcgcaccgtgtttacccacccagaaatcagcctctggcgcaaagggcaggaaacctttggtggtaacgtacatatcggagaactgcatatagttctcgccaccggcgttatcgccaaaccagccggtagagtactgctgaccaacgttaccatccatcatcacaacggcatcaacccgtttgccgttttcgttgtagacacgttgttttaactgcaaatcaaaccagccggagtattcgttaccaaagcggcccagagaaccaatcgcccaacttttaggactaccatgagaggcggtcccccaaccagaacggtaatagccgttgtaactaaagccaatttcatctttcacaaatttactgaaatctttcagagtcatggaagaataaatgctgcctgtctcactggcatttttctcttcatttttgaccagtacagcatcaggttttgcggcactactggtcgggaacggattggcggcatacccttgatcattcgtacttacgctacgattcaccgtcgctggcgtatactttttcttctcttcatctttatactttttgagttcgctttgcgtttctcttaacgccttttctaataactcaaggcgttgttccaccgttaaactttcagccaaactttgtgcagaaaaggctaacggtgccattaataagatggcagaggtaataagatttcgtctaaacataatatccctttatggtgcaaagaaagaattaacgcatcgcatccagactgttctgaatgcgacgataattaaggtgctttaatggttattttttttaaactcagcccccgcgtcttgatcacctctgcataccatccgaagcttttcttgcgtgttcttgtgaggcttccttcgccattatcatcacgatccacataaataaagccgtagcgcttagacatttgactatgagatgcactgactaaatcaattggcccccaactggtgtaccccataatatccacaccatcggcaatcgcttcatttacctgtaccaggtgatcgtttaaataggcaattcgataatcgtcctgtatgctaccatccgcttcaacgctgtcttttgcgcctaatccgttctcgacaataaataacggtttttgataacgatcccaaagcgtatttaacagaacccgtaatccaaccggatcaatttgccacccccactcactacttttcagatgcggattggggatcatattcagtatgttgccctgcgcatttttattaatgctttcgtcgtgggaaacacaaccagtcatgtaataactaaaagagatgaaatcgacggtatgttttaaatcttctgcgtcactttcagtcatctcaatggtgatattgtggtcgcggaagaaacgctgcatatagccgggatactggccacgcgcctgaacatcaccaaagaacatccagcgccggttctcttccatggcctgcaacatatcctgtggctggcaggtgagggggtaaaccagcccaccgagaagcatattgccgattttcgcttcggggagcaggctatgacaggctttaactgcccgcgcactggcaaccagttgatggtggatagcctgataaacttccgcctcgccactctcttctgccagccccacgcccgtgaatggcgcgtgtaagctcatgttgatttcattaaacgtcagccataacgccactttatgttggtagcgagtaaagaccgtgcgggcgtaatgctcgaagtgatcgatgaccgctcgattagcccaaccgccgtagtttttcaccagcccatatggcatttcgtaatgggataacgttaccagcggcttgatccccgcctgcgccatttcatcaaacagccgatcgtaaaacgctaaccccgcttcattcggttcgacttcgtcgccctgagggaaaattcgcgcccaggcaatggaaatacgcagacaggtgaagcccatctcggcaaataacgcgatatcttccgggtaacggtgataaaaatcgatggcgacatctttgatattctctttccccaggatgcgcggttccatttttcccattacgccatgaggctgtaaatcactggtgctgatccctttgccatcttcctgccaggcaccttccacctgattggcagctgttgcgccaccccaaagaaatgtttctggaaatgctttcataattaactccttttatcgttagcgaatgatggataacagcggttcacctgcgcttatctgcgccgtgccgtggggtaatacgtccgtaaaatcatcgctattactgattaataccggcgtcgtcagatcaaatccggcctcgcgaatagcagggatatcaaaagaaatcagccgatcgcctgtattgaccttgtcacccacgttgacgtgagcggaaaagaatttgccgtccagttttacggtgtcgataccgacatgaatcaggatctccacaccatcatcactctcaatgccaatggcgtgtaatgtggcgaacaagctagcaattcgacccgcaaccggagaacgcacttcaccaacgctgggcagaatggcaatacctttacccaacaggccactggcaaacgtggtatcagcgacgtgaatgagcggcacaatctctcccgtcatcggactacagataccgccctgctcaggtggtgtaataacctctggtgttttctcttgcggggcaccctgcgctggctgacgtttagcggtgatgaaatgaagcatcaccgtaccgacaaatgcgcaaccgatggcaatgacaccgccaataacgctggcccagacggtgaaatcaattcccgtactcgggatggtttgcatgaaggtgaaaatacttggcaaaccaaaggagtagactttcgtttgcgcgtagccaataatggtggcccccaaagccccactgatacaggcgataacaaaggggtacttacgcggcaggttgacgccatataccgctggttcggtgataccaaacagactcgtcaacgccgcacttcccgccaccacttttttctgcgcatcgcgttcgcagaggaagacgccgagcgccgccccgacctgcgccataatggcgggcattaacagcgggatcatggtgtcgtagcccagcacggtgaagttattgatacacagcggcaccaggccccagtgcagtccgaacatgacgaagatttgccagaagccgcccattaccgcgcccgcaaatgcaggaaccgcctgataaagccagagataaccggcggcaatcagttcgcttatccaggtacttagcggccccaccagcagaaaggtgacgggtgtgataaccatcagacatagcaatggtgtgaagaaatttttgattgcgctcggtaaccacgcattaagtcggcgttccagaatgctgcacaaccaggcagaaaaaataatgggaataacgctactgctgtaattcaacaatgtgaccggaatacccaggaaatccagccccagcgcatccgctttttgcccgttctcgaaagcagtcagaattaatggatgcactaacgctccaccaatcaccatggcagtaaatggattaccgccgaagcgtttccccgcggtgtatcccaggattatcgggaagaaccaaaacaaggcatcactggcgctgaataaaattaaataagtaccactttgttcggtcgtccactgaaaagtgagcgccagagccagcatacctttcaagatcccggttgccgccatcaaaccgatcagaggcgtaaaaataccactaataacataaacaaagcggtttagcagattacctttatcatcattttccggtgcctgttgcgctttttcgtcaaggcctgccacactgttaaccgccaggaagacatcggccacatggttacctatgaccacctgaaactggccaccgctttccaccaccataataataccgggggtctttttcagtacctctgcttgcgctttgctttcatcctttaatttaaaacgtaatcgcgttgcgcaatgcatcagactcacaatgttatctgcgcccccgactcctgcgactatttttctggctaactccgtcataacttgccctctaccgctttgcggcaaaactccaaaaaaaaacctgaaaaaaacggcctgacgtgaatcaagcaatttttttcaggttttgcccgcttagtgcggtaacaatcctttactcagtaataatatttcagtgttctttgcgcacgcgctctatatttatggctaaaaacataatctctgcgggactaattttacgttgatactgcaaaccaataaaaatggcgatccgttccgcacattgccatgcttgcgggtaattttgttttactgcttgttgtaaactttcatcactatcgttaatactagcatgttcaagaatacgccaggataaaaacttcagatgtgtaaccagtcgctgataactcaagctttcttcctggtaattaaggctgaactgaaattttattaattgcagcatttcgcgcattaactgcgtgacacctgcaacatcctccatatttccgctcatttgggcactgaccagatgcatggcaataaagcccacttcatctttcggtaactgcacgcccaaccgtttatcaataatggttaacgcttcttcccctagctggaactctttcgggtaaagccgctggatatcccacagcaacgggttgggcagcaacacgttttgctgaaagcgtttaatcgcaaactggcaatggtcagttaggctgatataaatactgtcctgtaattttcccaagcgctcctgcgctaaagagataatacgatcacaggttgccatcacctcaagaggaatatgacttaagagttcgcttaatcgcccgttcagttcatgactgctcaaggcatactctttttctattccactactgttaattctttcgccagcgcgtttttgaaagccaattccgcgccccatgacgactttttcccgctgttgatcatcaataaccaccacaacattattgttgagaattttggtgatttgcatgttcatagcaaggaccttttttataaacaaaaaaacccgacttcaccagtattctctggttatgtcaggttttgcctgcgaatgcagtaacaatccagtcatttattaatggtttttataacgaacatccaggttcggaaattaatttaattgcgtgcagagaaaatagcaatgcgctattgataaaaatatgaccatgctcgcagttattaactttgtgtaattttaggaatttataaagttatatataacaaatcccaataattaagttattgggatttgtctggtgaattatttgtcgctatctttccccgccagcagtttatccagctcatcgccaccgacgtgacggaaatcctgccccttcacgtagtagaagataaactcacaaatattctggcagcggtcgccaatacgttcgatagaacgcgcgcagaacagcgcagtaagtacgctcggaatggtacggctatcttccatcatgtaggtcatcagttgacgaacaataccttcgtattcctgatcgacttttttatcttcacgataaatacgtaccgcttcgtcaatgtccatccgcgcgaacgcgtccagcacgtcgtgcagcatctggatggtatgacggcccaggctctccagacttaccagcaacggctgatgctgctgggagaatttctccagcgcagtacggcagattttgtccgccacgtcgccaatacgctccagctcggcaatggttttactgatcaccataaccagtcgcaggtcgctcgccgtcggctgacgtttggcgataatgcgcacgcaggcttcatcgatcgccacttccatcatgttgacgttcttgtcgccttcgatgacgcgcttcgccagatcgctgtcctggttatgcatcgcggtgattgcatcagaaagctgctgctccaccatgccgcccatggtcatcacctgcgtgcggatactttccagttcggcgttgaactggccggaaatatgtttattaagattgagactgtccataacgcactcctgaatcaaccgtaacgaccggtgatgtagtcttctgtttgtttcttcgctggcttggtgaacagatcgtccgtgttgctgaactcaatcaattcgcccaggtacataaacgccgtgtggtcggaacaacgcgcagcctgctgcatgttgtgggtgacgatcaccacggtgtaatcctgcttcagttcggtgatcagctcttcaatacgcccggtagagatagggtcgagcgcgctacacggttcgtcgagcagcagcacttccgggcgaatggcgataccacgcgcaatacacagacgctgttgctgaccaccagagagagagtaaccgctctggtgcaatttatctttggtttcgttccacaatgcggctttggtcaatgcccactgcacgcgctcgtccatgtcggcacgggagagcttctcaaacagacgaacgccaaaagcgatgttgtcgtagatggacatcggaaacggcgtcggtttctggaacaccatgcccactttcgcacgcagcagtgcgatatcctgagagttggtcaggatgttgtcgccatcaagcagaatttcaccttccgcacgctgctccgggtacagttcaaacattttgttgaaggtacgcagcagcgtgcttttaccgcagccggacggcccgataaacgccgttacctggtttttagcgatatccaggttgatgtttttcagggcatggaatttgccgtagtagaagttcaaattacgaacctgaattttactcggggcagtttcaaccatactcattgcaatcttttcctcatcgtgcctgatgcacttcgctaatcaggcttaccgtaggccggatcaggcgttcacgccgcatccggcaaagtgttaaccgtgtacagagtcaaaaaggcgctcggtcggtcccctcgcccctctggggagagggttagggtgaggggaaaaccgtgtcagcaatatcaaccgtgtttattcttcgcaaaaacaacgcgcgccagaatgttcagcagcagtacgcacagggtaatgatcaataccccggcccaggccaattgctgccattccgcaaacgggctcatcgcaaacttaaagatcgtcaccggcaggttggcgatcggctgcatcatgtccgtgctccagaactggttggagagcgcggtaaacagcagcggcgcggtttcaccagcaatacgggcaatcgccagcaggataccggtcataatcccggacacgctcgctttcagcgtaatcgcagagatcatcttccacttcggtgtacccagcgcataagccgcttcacgcaggctgtacggcaccagtttcagcatgttctcggtggtgcggataacaatcggcacctgcaacaacgccagggcaatcacgcccgcccagccggagaagtgctccatctgcgccaccacaatggtgtaaacaaacagaccaaccacaatgctcggcgcagagagcagaatgtcgttaatgaagcgaatcacttctgccagccaggatttacgaccatattccgccagataaatccccgccataatgcccagcggcgtaccgaataccgtggcccacaaaattaacagcccgctacccgccagagcgttcgccagaccaccaccttccgtattgggcggcggcgtcatttcagtgaacagcgccaggctcataccgtcgataccgcgagtgatggtggacattaaaatccagatcagccagaacaggccgaaggccatcgtcgccatgctgagcgtcagcgcaatacggtttttgaggcggcgacgcgcctgcattttgcggcgagattcagccagcgccgcagtggtttgcatttcaaccatagccattagcgtgccccctcattcttagccaggcgcataatcataaacttgcttgcggcgaggacgatgaaggtaatcacaaacaggatcaggcccagttccatcagtgcggcaacgtgcagaccggattccgcttccgcaaattcgttcgccagcgcagaggtgatactgttgcccggcatatacaggctggcgctgtcgagctggtaggtgttaccgatgataaaggtcaccgccatggtttcaccgagcgcgcggcccagccccagcatgatgccgccgataacaccatttttggtgaacggaagaacgatacgccagataacttcccaggtggtgcagccaataccgtaggcgctctctttcatcatcaccggggtttgttcgaacacatcacgcattaccgccgcaatgtacggaataatcatgatggcgaggatcacgcctgccgcgaggataccgataccaaatgcggggccagagaacagcgcgccaacaatcgggatattgctcatgatattgccgaccggctcctgaaagtaaacggcgaacagcggcgcaaagataaacaggccccacatgccgtaaacgatacttggaatggctgccagcagctcaatggcgatacccagcgggcgtttcagccagccaggcgcaagctcagtcaggaacagggcgataccgaaactcaccgggacggcgatcagcagcgcgataaagctagtcaccaacgtaccgtagatcggcaccagcgccccgtagatatcgttcggtgcatcccactctttggtccataggaaagccagaccaaatttctgaatgctcggccaggaggagatgatcagagagacaataatgccacccaacatcaatagcacaatcagcgccgccagttttaccagcacgctgaaaattatgtcgccctttttacccggtgggttaaaagcaggcttggttgcagccataagttactcttcagttaaacgcgtttacaaagtcattttgtaatgccggatgcggcgtaaaacaccgtacccggcctggagttttattagtacagcggcttaccgctactgtctttaatattggtcttccacgcagcgcgaacctgttcaactacactatccggcaggctggcgtaatccaggtcgttcgcctgtttagccccggttttgtacgcccagtcgaagaatttcagcacttctgtgccttgttctggtttcttctgatctttgtggatcagaatgaacgtggtagaggtaataggccatgcatcttcgcctttctggttggtcagatcctgagcgaaggttttgctccagtctgcaccttttgctgcattagcgaagttttcttcggtcggactaaccggtttaccatcagcggagatcagtttggtgtacgccaggttgttctgcttcgcgtaagcatattcaacataaccaattgcacccggcagacgctgaacgaacgcggcgataccgtcgttacctttaccgcccagaccgatcggccattttacggtagagccagtaccaacgttgtttttccactcttcgttcactttcgccaggtagctggtgaagacgaaggaagtcccggagccatctgcgcggcgtactacagcaatgttttgactaggcagtttcagacccggattcagtttggcgatggcttcatcatcccacttcttgattttgcccaggtagatgtcgccgagggttttaccatccagcaccagttcgccagacttcagccctggaatgttaaccgccagcaccacgccgccaatcacggtcgggaactggaacagaccttcctgagccagtttttcgtcagacagcggcgcgtcagaggcaccaaaatcaacggtattagcgataatctgttttacgccaccggaagaaccgataccctggtagttaactttattaccggtttctttctggtaagtgtcagcccatttggcatacaccggcgcagggaaggttgcacctgcacctgtcaggcttgcttctgcaaacacagagaaagcactcatgcttaaggtcgcggcgacaacagttgcgacggtggtacgcataactttcataatgtctcctgggaggattcataaagcattgtttgttggctacgagaagcaaaataggacaaacaggtgacagttatatgtaaggaatatgacagttttatgacagagagataaagtcttcagtctgatttaaataagcgttgatattcagtcaattacaaacattaataacgaagagatgacagaaaaattttcattctgtgacagagaaaaagtagccgaagatgacggtttgtcacatggagttggcaggatgtttgattaaaaacataacaggaagaaaaatgccccgcttacgcagggcatccatttattactcaaccgtaacgctttttgccaggttacgcggctggtcaacgtcggtgcctttgatcagcgcgacatggtaagccagcagctgcagcggaacggtgtagaagatcggtgcaatcacctcttccacatgcggcatctcgatgatgtgcatgttatcgctacttacaaaacccgcatcctgatcggcgaagacatacaactgaccgccacgcgcgcgaacttcttcaatgttggatttcagtttttccagcaattcgttgttcggtgcaacaacaataaccggcatatcggcatcaattagcgccagcggaccgtgtttcagttcgccagcagcgtaggcttcagcgtgaatgtaagagatctctttcaacttcaatgcgccttccagcgcgattgggtactgatcgccacggcccaggaacagcgcgtgatgtttgtcagagaaatcttctgccagcgcttcaatgcgtttgtcctgagacagcatctgctcaatacggctcggcagcgcctgcagaccatgcacgatgtcatgttcaatggaggcatccagacctttcaggcgagacagcttcgccaccagcatcaacagcacagttaactgagtggtgaatgctttagtggatgccacgccgatttctgtacccgcgttggtcattagcgccagatcggattcgcgcaccagagaagaacccggaacgttacagattgccagactaccaaggtaacccagctctttgctcagacgcaggccagccagggtatccgcggtttcgccagactgactcaaggtgatcatcaggctgttacgacgcacggcagatttgcgatagcggaattcagaggcgatttcgacgtcgcacggaatacctgctaggctttcaaaccagtagcgggaaaccataccggagttataagaagtaccacaggcgaggatctgaatatgctcaaccttgctcagcagttcgtcggcgttcggtcccagctcgcttaaatcaacctgaccgtggctgatgcgtccggtaagggtgtttttgatcgcgttcggctgttcgtagatctctttctgcatgtagtgacggtaaatgcctttatcgcccgcgtcatattgcagattggattcgatatcctgacgttttacttccgcgccagttttatcgaagatgtttacgctacggcgagtgatttccgcaatatcgccctcttcaaggaagataaagcgacgggtcaccggcaacagcgccagctggtcagaagcgataaagttttcgcccatccccaggccaatcaccagcggactaccagaacgtgccgccagcagggtatccgggtgacgggagtccatgatcactgtaccgtacgcaccacgcagctgcgggatagcacgcagaacggcctcacgcagagtcccgccttgtttcagctcccagttcaccagatgggcaatcacttcggtgtcggtttcagaaacgaaggtatagccacgcgcttttagctcttcacgcagcggttcatggttttcgatgatgccgttatgcaccaccacaatgtgttcagaaacatgcggatgcgcattcacttcactaggttcaccgtgggtcgcccagcgagtgtgagcaataccagtgccgccatgcagaggatgttcttccgctgcctgtgccagcatctggactttaccgaggcgacgcaggcgggtcatatgaccttctgcatcaacaacggccagaccggcagagtcatatccgcggtattccagacgacgtaaaccttcaagaaggatttctgctacatcacgttgcgcgatcgcgccaacaattccacacatagtttttgattccgatttatatcgttgtcggtcaacctgtatgcccgttttttcgggcgccccgagccttgtagagagtggggttatttttatagttactgcttgtgggagggagattatgttatctcctcatcccatgtgaccgggttagccggccagaatcactttttctttaccggacgacgccagccttctttctgagtctgcggcacacggctgatagctaatgcattttcgccgacattacgcgtcacagttgtacccgcagcaatggtcgcgcctttgcctactgttaccggggccaccagctgagtgtcggaaccaacaaacacatcgtcgccgataatggtcttaaatttattcgcaccatcgtagttgcaggtaatggttcccgcgccgatgttaacgttatcgccaatttccgcatcgcccaggtaagtcagatgaccagctttgctgcctttacccagacgcgcttttttcatctcaacgaagttaccgacgtgagcaccttccagcaactcagcaccaggacgcaaacgggcaaacgggccaatggtacaggccgctgccagattcgcatcttccacaacggtatacggactgatttcgcaatcatcgccaatcacgctgtttttaatcacgcaaccggtgccaattttcacgcgatgaccgagagtcacgttgccctcgatgataacgttagtatcaatttcaacatcgcgcccgtgagttagcgtaccacgcagatcaaaacgcgctggatcgcgcagcataacgcctgctaacagcagtttttcagcctgttcggactgataaacacgctccagacgggagagttgcaggcggttattcacgccttctacttcgcttaaacgttgcggatgaacggcgacgatttcacgcccttcctgatacgccagcgcaataatgtcggtgatgtagtattcgccctgagcattattgttggtcagcttcgccagccagcgtttcatatctgcgccgttggcaatcagaatgccggtgttgatctcctgaatctgacgctgctcgtcggtggcatctttgtgctcaacaatgccggtaactttgccgttttcacgggtgatacgtccataaccggtcggatcatccagtttcaccgtcagcagaccaatgccaccctgcggtttagcatcacgcagacgctggagtgtttcgacagagatcagcggcacgtcgccgtagagcattaaaatgtcttcatcatcggcaaagaaaggtgcggcctgctgcattgcatgacccgtacccagctgctctgcctgaagcacccagttaaggttgtcgtctttcagcgcctgttttagcagatcgccgccgtgaccgtacaccaggtgaacgtgcgctgcgcctaattcattcgcagcatcaatgacatgctgaaccatcgctttcccggcaagggtatgcagcactttcggaagatcggaatacatgcgcgtgcctttgcctgcggcaaggatcactacgctcatagcattattcaacatacgcgtcctgactgtaatttgagaacgaatttaaaccgcttcaccttgaaaaaactacatttttttcatcgtgaaatggacagaggataaattgttcaataacggattatccccgctgacgaaagcgccattttcgaccatcgtcacgccttttgtctgcagaaaattaaggcagtaccttaatttaagcgtcaggtggatgtttttgctcttatttcgatcaatgaataaacaggaaaacaggggggttttatatcagcaggatctatgtgaacgctattcaggacgggtcacacgcgcaaaaaaaagccagcctgtttccagactggcttttgtgcttttcaagccggtgttacatcgcttttttggtcaactcgataacgcgcagctgcgcgatcgctttggccagttccgcagacgcctgagcgtaatctacgtcgccgtgagagctgctaatgtgctcttcagccttacgtttcgcttccatggctcgcgcttcgtcgagatcctggccgcgaattgcggtgtcggccagaacggtcacgttgccaggctgcacttcaagaatgccgccagacagatagataaactcttcgtgaccgtgctgtttcacgatgcgaatcataccaggcttaatggcggtgagcagcggtgcgtggccagggtagatccccagttcaccttcgctacccgttacctggattttctcgaccagaccagagaacatttgttgctctgcgctgacgacgtccaggtggtaagtcattgccatatcaccctccgattaaggcgttaaagttttttggctttttccacagcttcttcgatggaaccgaccatgtagaacgcctgctccggcaggtgatcgtattcgccttccatgatgcctttaaagccacggatggtgtctttcagggagacgtatttacccggagaaccggtgaatacttctgccacgaagaacggctgggacaggaagcgctggatcttacgagcacgcgctaccaccagtttgtcttcttcagacagttcatccatacccaggatggcgatgatgtctttcagttcctgataacgttgcaggatggactgaacgccacgcgcggtgtcgtagtgttcctgaccaaccaccagcgggtccagctgacggctggtggagtccagcgggtcaacggccgggtagatacccagagacgcgatctgacggctcagtaccacggttgcgtcaaggtgcgcaaaggtggttgccggagacgggtcagtcaagtcatccgcaggtacgtatactgcctgtacggaggtgatagaaccagttttggtggaggtgatacgttcctgcagaacgcccatctcttccgccagggtcggctgataacctaccgcactaggcatacggcccagcagtgcggatacttccgtaccggccagggtgtaacgatagatgttgtcaacgaacagcagaacgtcacgaccttcgtcacggaatttctcagccatggtcagaccggtcagagcaacgcgcagacggtttcccggcggctcgttcatctggccatacaccagggatactttgtcgataacgttggagtcggtcatttcgtggtagaagtcgttaccctcacgagtacgttcacctacgcccgcaaacacagagtaaccggagtgctcgatcgcgatgttacgaatgagctccatcatgtttacggttttacctacacccgcaccaccgaacagaccaactttaccgcccttagcgaacggacacatcaggtcgataactttgataccggtttccagcagttcctgagagttactcagctcttcgtaggaaggtgctgcgcggtgaatcgcccaacgctcttcttcaccgatctcgcctttcatgtcgaccggttcacccagtacgttcatgatacggcccagagtcgctttacctaccgggacttcaatcgggtgttcgaggtcttttacatccagaccgcgacgcagaccgtcggaggaacccattgcgatggtacgtacgataccgccgccgagctgctgctgaacttccagcaccagacgctcattaccattttgcacctcaagagcatcgtacacgcgcggtacggcatcctgagggaattcgacgtcaactacggcgccgattacctggacaatctttccagtagccatcttaaatcctctacgaaataacctgtttaaaccgcggcggccccgctgacgatctcggtgagttcctgagtaatgctggcctgacgagctttgttgtataccaactgcagctctttaatcaggctgccgccattgtcggtcgcggctttcatcgccaccatacgggcggcctgctcgctggccaggttttcaaccacgccctgataaacctgagattcgacataacgacgcagcagggtatccagcaacgccttcggatcgggttcgtacaggtaatcccaggatttatgtttcagatcatcatcatcacttgccggtaacggcagcagctggctgatggtcggaacctgagacatggtgttaataaatttgttgctgacaatgtaaagcttgtccagacggccttcgtcgtaggcctgcaacatcacttttaccggaccgatcagttcggacagggaagggttatcccccatgccggtgacctgggcaacaacattgccgcccacggagttgaagaagctcacgcctttgctgccgatcattgcgaggtcgcattgaacgcctttgtcggtccaggtcttcatttccgccagcagttttttgaacaggttaatgttcaaaccaccgcacaaaccacggtcggtgctcaccaccaggtagcccacgcgtttaacgtcgcggtcttccaggtaagggtgcttatattccagattaccgtgtgcaaggtgaccaatcactttgcgcatggtttctgcataaggacggctggccgccatgcgatcctggcttttacgcattttggaagcggcgaccatctccatcgctttagtgatcttttgcgtgttctggacgcttgcgatcttactacgtatctcttttgcgccggccatgagcttctcctcaatgccttgcggcctgccctaaggcaagccgccagacgttaccaggattgggttgctttgaaggaatcgaggatgcctttcagcttgccttcgatttcgtcgttgtagccaccggtctggttgatctcttgcatcaacggagcgtgatcacggtcgacgtaagccagcagagcggcttcgaagctgccaattttgctcagttcaacatccgccaggtaaccacgttctgctgcgaacagaaccagagactgctgcgcaacggacatcggcgcatactgtttctgtttcagcagttcggtcactttctgaccgtggtcaagctgcttacgtgttgcatcgtcaaggtcggatgcaaactgagagaacgctgccagttcacgatactgtgccagagcggtacggataccaccggacagttttttcatgatcttggtctgtgctgcaccaccaacacgggatacggaaatacccgggttaaccgcaggacgaataccggcgttgaacaggttggtttccaggaagatctgaccatcggtaatggagattacgttggtcggaacgaacgcagaaacgtcacccgcctgagtttcgataatcggcagtgcggtcagagaaccggttttccctttcacttcacctttggtgaaggcttcaacgtattcggcgttaacacgtgcagcacgctccagcagacgagagtggaggtagaaaacgtcgcccgggaatgcttcacgtcctggcggacgacggagcagcagggagatctgacggtaagcaacagcctgtttagacaggtcatcgtaaatgatcagcgcatcttcaccgcggtcacggaagtattcgcccattgcgcaaccggcatacggtgccaggtattgcagtgcagcggattcagacgcggttgctaccacaacgatggtgttagccagtgcgccgtgctcttccagtttacgtaccacgttagaaatggtggacgctttctggccgatagcgacatagatacatttgataccggaatcgcgctggttgatgatggcatcgatagccagtgcggttttacctgtctgacggtcaccgatgatcaattcacgctgaccacgaccgattgggatcatggagtcaacggctttataaccggtctgtaccggctgatctacggactgacgttcgataacgcccggagcgattgcttctacagcagagaagccgtcgtgatccagcggacctttaccgtcgattggtgcacccagagtgttaaccacacggcccagcaggccacggccaaccggaacttccaggatacggccagtacacttaactttcatgccttcggcaaggtcagcgtacggacccataacaaccgcacctacagagtcgcgctcgaggttcagtgcgatagcgtaacggttacccggcagggagatcatttcaccctgcatacaatcggccaggccgtgaatgcggataacaccgtcacttacagaaacaatagtaccttcgttgtgagcttcactcacaacattgaactgagcaatgcgctgcttgatcagttcgctgatttcggtggaattcagttgcatgctccagtccccttaagactgcaagacgtctgcaaggcgctcaagacgaccgcgtacgctgccatcaatgaccatatcacccgctcggatgataacgcctgccattacagacttatcgattttgcaattcagcttaactttgcgactcagacgtttttccatcgcagcagaaattttcgcgagctgttgttcactcagtgcggcagcggaaatgacgtctacctcagcggtagcctcactcacggcacgcaggtgaataaactgctccagaacatccgggagcgcgttaagacgaccattttcagccataacccgaatcaggttctgaccgttttcgtccagttgctcaccacaaactgcgataaagctctcggcgagcgtttctggcgcaagcgcgccagagagaagctctgccatttgttcgtttttggttacctcggcggcaaacgccagcatgtcctgccagcgttctacactttggtgttcgacggcaaagtcaaaagctgctttggcgtaggggcgagctaccgtaataaattcagacatcagcccctccctccttacagttcagcgacaagtttatccacgatgtcgctgttagcagcttcatccacggaacgttcgatgatcttctcggcgccagcaacagccaggatagcaacttgcttacgcagctcttcacgggcacgtttacgctcggcttcaatttccgcctgcgcctgggccacgattttagtacgttcctgttctgcctcagctttcgcttcgtccagaatctggctgcggcgtttgttcgcctgctcgatgattacctgggcttccgctttcgcttttttcagctggtcggtcgcgctggcctttgcaaggtcaaggtccttatgtgctcgttctgcggaagcaaggccgtcagcaatttctttttgacgtttttcgatggctgccattaatggcggccatacgtacttcatgcagaacagaacgaacaggacaaacgcgatggcctggccgaggattgttgcgttaagattcacagcacaatgcctctatttagttaacgttctgatattgctctttaaataaaagcaacgcttattacgcgacagcgaacatcacgtacagacccagacctacagcgatcatcgggatagcatccaccagacccataacgataaagaactgagtacgcagcagaggaatcagatcaggttgacgcgctgcgccttccaggaatttacccccgaggatgccgataccgatcgcagcaccgattgccgccagacccatcatcacagcggcagccatgtacagcagatccatattcaggttttccatgacagtctccagtttgtttcagttaaaacgtagtagtgttggtaaattaatgttcttcagacgccatgctcagatagacgatcgtcagaaccatgaagatgaaggcttgcagcgtaatgatcaggatgtggaaaatggcccacggcacattcaggatccactgactccaccacggcaacagaccagcaatcagaatgaaaatcagctcaccggcatacatgttaccgaacagtcgcaaaccgagactaactggtttggacagcaggcttaccccttcaaggattaagttgacaggaatgaacgcccagtgattgaacggctgcagcgtcaactctttcgtgaagccgccgatgcctttcattttgatgctgtagaacagaatcaggataaatacgcccagtgccatagacagcgttacgttcacgtccgcagacggaaccacacgcagtgcaggcagacccagtacatgttcagcaatgtacggcagcaggtcgataggcagtaaatccatcaggttcatcaggaatacccagacgaagatcgtcagggccagcggagcaatcagcttgcttttgccatggtacatgtctttcacgctaccattaacaaagccgatcaccagctcaatcgcggtctgaaacttacctggcacaccgctggtcgcctttttggctacgctacggaataaaaccaggaacaacagacccagcaccacgctgaagaacatggagtcaatattgattgtccagaaggtggctggggggttttgtggatccaccaggctgaatgtacgcaggtccagctgaaggttattcaggtggtgtcctatgtaatcctgcggcgtcatattttcactagccatgatgccttttaccctttgttgttaattacagccggtgccagtatctgaaccaccagcaccaaaacccacgtaacgatcagcggcaagaataccgcctttaaaaccgccaacgccaccaccagtaacaccaacatcgccagaactttgaaagcttcgccaaatgcgaatgtccaggccacccggcctttcgctggtgtatgcgcctggtgacgccaggcaaatatcataaacaaaacgttaggcagaaagactgccaggcccccgcttattgcagagacgccccagaaggggtctttgaggctgaacagcaatccacttgctatcaccaccagtaactgaacgagcagaagcttccgagcaacgtttcgactcacgaggctcacagacatcacgtttttcactcctgctcccttcgaggtatgccgcgtgtcgtataaaactttctttaaggcttagagtcaagcatcaaaaagcggtcaaattatacggtgcgcccccgtgatttcaaacaataagtagccaaaaggtgaataaatgtttaaatatttttccagtgcatacaattgcgacttttctgctaaccctgttcgatcatgaaaaactgtaaataacgcgtaaacactggtgataaagcgtgcttcagatcacatattgcgcatgttcgcgcacagcatatttatttacttggcaaatgatgcctttgcaagtttatgatatttcagtctaaaaacagatactgttttaataaatgacatttacacaacaaaaaccacccattgacatttttaataatgttttaacagccaatgatggttcttagcgccgatttttagcagactgatattttcactaatgacttattttctgcttaccaaaaaaagccacgttatcttgttgatgcaaaagagtgaacgtggcgttaaatgtaaccagttatatcagtagaaaacctggttgttgttaacagtctaaccggtcaattttttatgatttttttgataaaaattaaattttatttgctttaatcaccaccagatgacgttcgccatccagggctggaacctgaagtttaaccacactttcgacctgatattcttcgggcaacaaagcgatttcatcttccggcatttgccctttcagcgcgtagaaacggccttgctcaccaggaagatggtggcaccagctcaccatatcgttcagagaggcaaaagcgcggctaattacgccatcaaatggcggctcactaggaaactcttctaccctgctctgtactggttcaatattctccagtttaagctcatgttgcacctgacgaaggaaacgcacgcgtttaccaaggctatccaacagagtgaaatgggcttcaggacgcacgatagagagtggaatgcctggcagtcctggtccggtgccgacatcgataaaccgttcaccttgcagatacggtgccaccacaatgctatcgagaatatggcgtaccagcatctcattaggatcgcggacgctagtcaggttgtacgctttgttccatttatgcagcatattcacgtaggcaataagctggtttttctggtgatcggtaaggctaatacctgcgtctttcagcagtaaggagagtttgttgagcacggtgattacctgttcttgatgcgttgcctggtaagcgggtgcttaccaggcatttttaatgcgttatgcgctacgacgcagcataccctgttttttcagccacaccagcagaatggagatggccgcaggcgtgacgccagaaatacggctagcttggccgatagaggctggtttgtgatcgttaagtttggcgatcacttcgttagaaagaccggatacctggcggtaatccagtgtcgcgggtagcagggtgttctcgttacgcagctgcttttcgatctcatcttgctggcgcgcgatataaccttcgtatttaacctgaatctcaacctgttccgccgcctgttcgtctgtcaacgcaggggcaaacggcgtcagcgtggttaatttttcataagtcatttccggacgacgcagcagatcttcaccactggcttcacgggaaagcggcgcagtcaggtgagcattcacttcggctgcagcttccgcgctcggggttacccaggtgcttttcagacgctgacgctcacgctcgatattctcaagtttctcgttaaagcgcgcccaacgttcgtcatccaccaggcccagttcacgaccgatttcagtcaaacgcagatccgcattatcttcgcgtagcatcagacgatattctgcgcggctagtaaacatacgatacggttctttggttcctaaagtgcacaggtcatcaactagtacgccgagatacgcctgagaacgtgccggagcccaaccttctttgtcagcagacagacgggcagcgttaagaccggccagcaaaccttgcgcagcggcttcttcgtaaccggtagtgccgttaatctgaccagcaaagaacagcccctggataaacttgctctccagcgtcggtttcaggtcgcgaggatcgaagaagtcatactcaatggcataacccggacgcacgatcttcgcgttttccatcccctgcatagagcggacgatttgcatctgcacatcgaacggcaggctggtggagataccgttcggataaatttcattagaggtcagtccttccggttcaaggaagatctgatgctgatttctgtcggcgaagcgcatgactttgtcttcgatgctcgggcagtagcgtgggccgacaccttcgatcacccctgcgtacattgggctacgatcgaggttactgcggatcacatcatgggttttctcgttggtatgagtgatataacacggcacctgctggggatgctgggacgcattgcccataaagctgaataccggcattgggttatcgccatgctgttgcgccagtacgctaaagtcgatggttcgagcatcaatacgcggtggtgtcccggttttcagacgaccaacgcgcagcggcagttcacgcaaacggcgagaaagcggaatggacggcggatcaccagcacggccaccgctgtaattatccagaccgatatgaattttaccgtcgaggaacgtcccaacggtgagcacgacggctttggcacggaacttcagtcccatttgggtaacagcaccgaccacgcgatcgttttcgacaataagatcttcaaccgcctgctggaagatcatcaggttcggttggttctccagcgccgtacgtaccgcctgacggtagagcacacgatccgcctgagctcgggtagcgcgaaccgccggtcctttgcttgcgtttagtatcctaaactggatacccgcctgatcgatcgctttcgccatcagaccgccgagtgcatccacttcttttaccagatgtcccttcccaataccgccgatcgccgggttgcagctcatctgccccagagtgtcgatattgtgtgtcaaaagcagagtctgttgacccatacgcgccgcggccatcgcggcctcggtgcctgcatgacccccgccaatgatgatgacgtcaaaaggatccggataaaacatggtgattgcctcgcataacgcggtatgaaaatggattgaagcccgggccgtggattctactcaactttgtcggcttgagaaagacctgggatcctgggtattaaaaagaagatctatttatttagagatctgttctattgtgatctcttattaggatcgcactgccctgtggataacaaggatccggcttttaagatcaacaacctggaaaggatcattaactgtgaatgatcggtgatcctggaccgtataagctgggatcagaatgaggggttatacacaactcaaaaactgaacaacagttgttctttggataactaccggttgatccaagcttcctgacagagttatccacagtagatcgcacgatctgtatacttatttgagtaaattaacccagcttcccagccattcttctgccggatcttccggaatgtcgtgatcaagaatgttgatcttcagtgtttcgcctgtctgttttgcaccggaatttttgagttctgcctcgagtttatcgatagccccacaaaaggtgtcatattcacgactgccaataccgattgcgccaaagcggactgcagaaagatcgggcttctgttcctgcaatgcttcatagaaaggagaaaggttgtccggaatatctccggcaccgtgggtggagctgataaccagccagatcccactggcaggtaaatcttctaacagcggaccgtgcagcgtttcggtggtaaaacccgcctcttccagcttttcagccaggtgttctgctacatattcggcaccgccgagggtgctgccgctgataagagtgatatctgccataaaccgccacctttattaagagtggcgtattgtacgctgtgaacgcgttgggatctacctgtggaaaagtatgggattaaaaaagccgatcagggcttgatggtacgcatgatcgggttttgcaggacgatcaatgtctcggtggactgaatttcatcaattgtttggatcttgttgataagtacatgctggagagcgtcgatgctacggcacatcacttttataaagatgctgtagtggccggttgtgtaataggcttcagtgacttcatcaaggctttccagctttgccagcgcggaagggtagtctttggcgctctttaatataatgccgataaagcagcctacgtcataaccgagctgcttcgggctgacatcaatacgcgccccggtaatgatccccgcctgcttcattttctctactcgaacgtgaatcgtccccggactgacgccaaattgtttcgccagttcggcgtaagcggtgcgcgcattgcccattaatgcttccaggatgccacggtccagattgtcgatcagataattttccataggattttcttatgcggattgatgattcattctattttagccttcttttttaatgaatcaaaagtgagttaggctttttattgaatgattattgcatgtgtgtcggtttttgttgcttaatcataagcaacaggacgcaggagtataaaaaatgaaaaccgcttacattgccaaacaacgtcaaattagcttcgtgaaatctcacttttctcgtcaactggaagaacgtctggggctgatcgaagtccaggcgccgattcttagccgtgtgggggatggcacgcaggataacttgagcggctgtgaaaaagcggtgcaggtaaaagtgaaagctctgcctgatgcccagttcgaagtggttcatagtctggcgaagtggaaacgtcagaccttagggcaacacgacttcagcgcgggcgaagggctgtacacgcacatgaaagcccttcgccccgatgaagaccgtctttctccgttgcacagcgtctatgttgaccagtgggactgggaacgcgtaatgggcgacggtgagcgtcaattcagcactctgaaaagcacggtagaggcgatctgggcgggaattaaagcaaccgaagctgcggttagcgaagagtttggcctggcaccgttcctgccggatcagatccacttcgtacacagccaggagttactgtctcgttatccggatcttgatgccaaagggcgtgagcgggcgatagcgaaagatcttggcgcggtattccttgtcgggattggcggcaagctgagcgatggtcatcgccacgacgtgcgcgcaccggattatgatgactggagcaccccgagtgagctgggccatgcgggtctgaacggcgatattctggtgtggaacccggtactggaagatgcgtttgagctttcctccatggggatccgtgtagatgccgacacgctgaagcatcaactggcgctgaccggtgacgaagatcgcctggagctggagtggcatcaggcgctgctgcgcggtgaaatgccgcagaccatcggcggcggtatcggccagtctcgtttgactatgctgctgctgcaactgccgcatatcggccaggttcagtgtggagtatggccagctgctgttcgcgagagcgtcccttctctgctgtaataatttatcgccgccagcgtctgagcaggcggcttcgcatcccggtatcaaagcgccagatatgatcgaaaatgcgcatgatgccgggtttgccgtgtgcgctcatcgccacggcatgaaagcgatgctgatgtacccgctgcagctctttcactttactcgtcacgtcgtcaggcaaccgctgagcgataaaatcagaaatcaccaccgcatcggcatcaaaccattccctgctttgcaagcgttccataatggcgcgaaaacaactggcaagatcggtgccgccacgaaactgctggcttaaaaaacggattgcttgttcgatgccttgtgggccactaagctcataacggacgatctcggtggaaaatagcataatatagcagcgccggttttctgcgagagcaatgcgcatcaaggccaggcagaacgctttcgcacactgttcattaaagccgcccatactgccggaagtatccacacagacaataaacggcccgcgcggctgttcatcgtaatctttatgtaccaccggacgttcgatcactttttcacgccagctctcaccgtgcaggcgataggtgagcaactgtttttccaccagccgacggtaaaactcatactccagttccgttatccctagtgtcgccagttctggcggcaggagacgtaaaatatcatcgctttgttgcagaccatcaacctgctcaggaaccgtcgccggttcgcgcaccatggtgcggaaggtttccatctgcgcatcgttgcgcggtatacttttggcttcccgagaacgccccagctgctctgccaggcgtttcagttccggctgttcgttaagaaattcaccgtatttcacaatcaactgatagtcgccacgtttaagctgaccggcgctcatatcccacagacgaccagctgcagtattgttatctgcgagaatcggttcaagttgtccgctcagcgtcatgcgttcctgaacttcactcaacagttgttcgcgttcttcttctaatagctgttgatttaacgtcgttgcttgcacgatcagacttaaacgccaacgctggagaaaaagcgtgtgtaacgcactagtgatcgtgctgttagcatcaaccaactgtcgggcttgttctgcccatggagaattcagacgatgcagtaagtccaggatctgtggtagctgcacaataaactgtggcgtggagaggagctggctttgctgatagcacatcacctcttcggtgagttccggcgggactcgggcatctttcagccgactgcgcagcgcttcacgccagcggggaacatcatcagtgattgccgccttcaggcgtgggaatttttcaaagaagaccgccagctgcggactggccagcagtgcgatgatcatctcttcgatcaatccctcttcgctgacggccagcatcacattaagcgtatccagcgttagcattgttgtgcctggcgaatctgtgcaccgacatcctgtaggctggcttcaatgcgacctaaccagtcgccagggataaacagacatttttgctgttcgctgaataaagcgtgttgcttgcgccagtcgctttcaagctcttccagttgttgttttatttcaccaggcagaccttcagcgctactaccgggaagtgccagcgtactgccttgtaaacttacatcgcgaacgacaagatgttgggcgctatcaacttccagattcagtttctgggcaaagccgataccgttcagtttaccgcgaatttcaccacctttgctcagccactgttccagcgcgctacgctcaaaggagatatgaaccacttccatatcatgcagttttaacggtttttgcagcagtagagtcagagtggaagcagtaacgttaacaggaagttgatactgctgacgacggctgaaaatgccgcccagacgaattaccgttaaggctgttttatcgctttgttgctgctggagttgcaggtgacgttgcacaatcgcgccaaggcgagtcaacatcccttgctgttgccaggcgtgaccggtcatcaatacatcaatttgttgttgtatcaaattcaggctttgcgcgtcataccacaggcaatctttcagcaaaatgagatctaccggggcaacagcactgcgaccgctaaaaaaggcgctggcctgcaataatcggatcgcttttttccagcgacgatcgctgacataaggcgcatccggtaatttatccagttgctggcgcagcataaaaatcagctcaaatacatgatcgggcagcgtaatttcaccaatctctttctgccagcgttcatattcttcatctgtgacctgcaaggcatcaggaaccggattgtcgttttcatcctgttgactggtcagcatggagcggaaattcgctttatcctgcactttatctaaccacagacgaatcagcatgcggtcatataacgcttccagactgctgtctgcttccggcagctcgttggaggccgccaccagcagacgcatcgggattttttctacgtgtgcaccgttgcggaactggcgctcgttaatggcggtgagcaaggtattaagaattgccgggcccgctttccagatctcatccagaaagacaatttctgcttccggcaggtaaccgctggttaaacgttcatagcgcccttcatcttttagcgcctgaatagaaaggggaccaaaaacttcttccggcgtggagaagcgggtcatcagatattcaaacgcgcgggcattctgaaaggcgaattttaagcgccgggcgatcaaacttttggcaatacctggcgggccaaggaggaacacactttcaccacttaatgccgctaataaacacaagcggatggcgtggctacgttcataaagccccttttccaagctactgctcaggcgggaaattctttccgctaataaatgagggtgagccataatgaagtggcgtcctttcgtcaaaagttctgcgtaaattgcgagtatagacgtttcttgctggtggctaaaatagtctcaaagggggggtatttttctttgagccaggttaatgtggccgcatttaggagtacgattttgccgttaatcgtgcatactgtgcgcttttttgtgggccaagggactaagcacacatttcatatttcaacgaaagactagtctatgagcactgataataagcaaagtttgcccgcgattaccctcgcggcgattggagttgtctacggcgatattggtaccagcccgttatatacacttcgtgaatgtttgtccggccagtttggttttggcgttgaacgcgatgccgtgtttggctttttaagcctgatcttctggctgctaatctttgtggtttccattaaatatctcaccttcgtgatgcgggcagataacgccggtgagggggggatcctgacgttgatgagccttgccgggcgtaatacgagcgcgcgaaccacaagtatgctggtgattatggggctaatcggcggcagctttttctatggtgaagtcgtcataacacccgctattagcgtgatgagtgccattgaaggtctggaaatcgtcgccccgcagctggatacctggatagttcccctcagtattatcgttctcactttattatttatgattcaaaaacatggcacggctatggtcggtaagctgtttgcgccgatcatgctgacctggtttttgattctggcaggactggggttacgtagcattattgctaacccggaagtgctgcatgcgctgaatccaatgtgggcggtgcatttcttccttgaatacaaaacggtttcttttattgcattaggggcagtggtgttgagcattacgggggtcgaggcgctgtatgctgatatggggcactttggtaagttccctattcgcctggcgtggttcaccgtcgtattaccttccttgacccttaattacttcggtcagggagcgctgttgttaaagaacccggaagcgattaagaacccgttcttcctgttggcaccggactgggcgctgatcccgctgctgatcatcgccgcactggcgacggtaattgccagccaggcggttatctctggcgtcttcagtttgacgcgtcaggcggtacgtctgggatatttgagcccgatgcgcattattcacacctccgaaatggagagtgggcaaatctatattccgtttgtgaactggatgctctatgtcgcggtcgtgattgtgattgtcagctttgagcactccagcaacctggcggcggcgtacgggattgcggtgaccggaaccatggtgctgacgtctattctcagcactaccgtggcacgtcagaactggcactggaataagtattttgttgcgctgatcctgattgctttcctttgtgtcgatattccattgttcaccgctaacctcgataaactgctctccggcggctggttgccattgagcctcggtactgtgatgtttatcgtgatgaccacctggaagagcgagcgtttccgcttgctgcggcggatgcatgaacatggtaactctctggaagcgatgattgctagcctggagaaaagtccgcctgttcgcgtgcccgggaccgcggtgtatatgagccgtgcaatcaacgtcattccctttgcgctgatgcataaccttaaacataacaaggtattgcatgagcgggtgattctgttaactctgcgcaccgaagacgctccatatgtccataacgtccgtcgggtacagattgaacaactgagccccactttctggcgcgtggtggcaagttatggttggcgagaaacgccaaacgtagaagaagttttccaccgctgcggtctggaaggattaagttgccggatgatggaaacctccttctttatgagccatgagagcttgatcctcggcaaacgcccgtggtatttgcgtctgcgcggcaagctgtacttgctgctgcaacgtaatgcgctgcgtgcaccagatcaatttgaaatcccgccaaacagggttatcgaactgggtactcaggtcgaaatctaacgccagacgcctcctttcttcataagggggcgtttttgttttcatggttaatcaccatgtaaaacgtttcgaggttgatcacatttccgtaacgtcacgatggttttcccaactcagtcaggattaaactgtgggtcagcgaaacgtttcgctgatggagaaaaaaatgaaaaaaggcaccgttcttaattctgatattagtagcgtgatctcccgtctgggacataccgatacgctggtggtgtgtgatgctggtttacccatccccaaaagtacaacgcgtatcgatatggcattaacccagggtgtaccttcttttatgcaggtgctgggcgtcgtcacaaatgaaatgcaggtcgaggcggccattatcgcggaagagatcaaacaccataatccgcaactccacgaaacgttgctcactcaccttgagcagctgcaaaaacaccagggaaataccattgaaattcgttacaccacgcatgaacaattcaaacaacaaaccgcagaaagtcaggcggtaattcgcagcggagaatgttctccgtatgcgaatatcattctctgtgctggcgtgacgttctgaggccgtcatggaagcattacttcagcttaaaggcatcgataaagccttcccgggcgtaaaagccctcagcggcgcagcgttaaatgtctatccgggccgcgtgatggcgctggtgggcgaaaacggcgcgggtaaatccaccatgatgaaagtgcttactggcatctatactcgcgatgccggtacgcttttatggctggggaaagaaacgacatttaccgggccaaaatcttcccaggaagccgggattgggattatccatcaggaactgaacctgatcccgcagttgaccattgccgaaaacattttcctcggtcgtgagtttgttaatcgctttggcaaaattgactggaaaaccatgtatgccgaagcggataaattgctggctaaacttaacctgcgctttaaaagcgacaagctggtgggcgatctttccatcggtgaccagcaaatggttgaaatcgccaaagtgctgagctttgagagcaaagtcatcattatggatgaaccgaccgatgcgctgaccgataccgaaaccgaatccctgttccgcgtcatccgcgagctgaaaagccaaggccgcggtattgtctatatctcccaccgcatgaaagaaatcttcgagatttgcgatgacgttaccgtttttcgtgatgggcaatttattgctgagcgcgaagtggcaagtctgaccgaagatagcctgattgagatgatggtgggtcgcaagctggaagatcaatatccgcacctggacaaagcgccgggagatatccgcctgaaagtcgataatctctgcggacctggcgttaacgatgtctcttttactttacgcaaaggcgaaattcttggcgtctctggtttgatgggcgcaggtcgtaccgaactgatgaaagtgctctacggcgcactaccgcgcaccagcggttacgtcaccctggatgggcatgaagtcgttacccgtagtccgcaggatggcctggcaaacggcattgtgtatatctccgaagaccgtaaacgtgacggtttagtgttgggcatgagtgtaaaagagaacatgagcctgacagcgctgcgctacttcagccgcgctggcggcagtttgaagcatgccgatgaacagcaggctgtgagtgatttcattcgtctgtttaatgtgaaaactccgagcatggaacaggcaattggtctgctttccggtggcaatcagcaaaaagtggcgattgcccgcggtctgatgacacgccccaaagtgttgatccttgatgaacctacccgtggcgtagatgtcggcgcgaaaaaagagatctatcaactgattaaccagttcaaagccgatggcttgagcatcattctggtgagtagcgagatgccagaagtattaggcatgagcgatcgcatcatcgtcatgcatgaagggcatctcagcggggaatttactcgtgagcaggccacccaggaagtgttaatggctgccgctgtgggcaagcttaatcgcgtgaatcaggagtaaaaaaatgacaacccagactgtctctggtcgccgttatttcacgaaagcgtggctgatggagcagaaaagccttatcgctctgctggtgctgatcgcgattgtcagcacgttaagcccgaactttttcaccatcaataacttattcaatattctccagcaaaccagtgtgaacgccattatggcggtcgggatgacgctggtgatcctgacgagcggcatcgacttaagcgtaggttctctgttggcgctgaccggcgcagttgctgcatctatcgtcggcattgaagtcaatgcgctggtggctgtcgctgctgctctcgcgttaggtgccgcaattggtgcggtaaccggggtgattgtagcgaaaggtcgcgtccaggcgtttatcgctacgctggttatgatgcttttactgcgcggcgtgaccatggtttataccaacggtagcccagtgaataccggctttactgagaacgccgatctgtttggctggtttggtattggtcgtccgctgggcgtaccgacgccagtctggatcatggggattgtcttcctcgcggcctggtacatgctgcatcacacgcgtctggggcgttacatctacgcgctgggcggcaacgaagcggcaacgcgtctttctggtatcaacgtcaataaaatcaaaatcatcgtctattctctttgtggtctgctggcaagcctggccgggatcattgaagtggcgcgtctctcctccgcacaacccacggcggggactggctatgagctggatgctattgctgcggtggttctgggcggtacgagtctggcgggcggaaaaggtcgcattgttgggacgttgatcggcgcattaattcttggcttccttaataatggattgaatttgttaggtgtttcctcctattaccagatgatcgtcaaagcggtggtgattttgctggcggtgctggtagacaacaaaaagcagtaataacgactacaggacatcttgaatatgaacatgaaaaaactggctaccctggtttccgctgttgcgctaagcgccaccgtcagtgcgaatgcgatggcaaaagacaccatcgcgctggtggtctccacgcttaacaacccgttctttgtaagcctgaaagatggcgcgcagaaagaggcggataaacttggctataacctggtggtgctggactcccagaacaacccggcgaaagagctggcgaacgtgcaggacttaaccgttcgcggcacaaaaattctgctgattaacccgaccgactccgacgcagtgggtaatgctgtgaagatggctaaccaggcgaacatcccggttatcactcttgaccgccaggcaacgaaaggtgaagtggtgagccacattgcttctgataacgtactgggcggcaaaatcgctggtgattacatcgcgaagaaagcgggtgaaggtgccaaagttatcgagctgcaaggcattgctggtacatccgcagcccgtgaacgtggcgaaggcttccagcaggccgttgctgctcacaagtttaatgttcttgccagccagccagcagattttgatcgcattaaaggtttgaacgtaatgcagaacctgttgaccgctcatccggatgttcaggctgtattcgcgcagaatgatgaaatggcgctgggcgcgctgcgcgcactgcaaactgccggtaaaagcgatgtgatggtcgtcggatttgacggtacaccggatggcgaaaaagcggtgaatgatggcaaactagcagcgactatcgctcagctacccgatcagattggcgcgaaaggcgtcgaaaccgcagataaagtgctgaaaggcgagaaagttcaggctaagtatccggttgatctgaaactggttgttaagcagtaattttaatcaggttgtatgacctgatggtgacataaatacgtcatcgacagatgaacgtgtaatataaagaaaagcagggcacgcgccaccctaacacggtggcgcattttatggacatcccgaatatgcaaaacgcaggcagcctcgttgttcttggcagcattaatgctgaccacattcttaatcttcaatcttttcctactccaggcgaaaccgtaaccggtaaccactatcaggttgcatttggcggcaaaggcgcgaatcaggctgtggctgctgggcgtagcggtgcgaatatcgcgtttattgcctgtacgggtgatgacagcattggtgagagcgttcgccagcagctcgccactgataacattgatattactccggtcagcgtgatcaaaggcgaaagtacaggtgtggcgctgatttttgttaatggcgaaggtgagaatgtcatcggtattcatgccggcgctaatgctgccctttccccggcgctggtggaagcgcaacgtgagcgtattgccaacgcgagtgcattattaatgcagctggaaagtccactcgaaagtgtgatggcagcggcgaaaatcgcccatcaaaataagactatcgttgcgcttaacccggctccggctcgcgaacttcctgacgaactgctggcgctggtggacattattacgccaaacgaaacggaagcagaaaagctcaccggtattcgtgttgaaaatgatgaagatgcagcgaaggcggcgcaggtactgcatgaaaaaggtatccgtactgtactgattactttaggaagtcgtggtgtatgggctagcgtgaatggtgaaggtcagcgcgttcctggattccgggtgcaggctgtcgataccattgctgccggagatacctttaacggtgcgttaatcacggcattgctggaagaaaaaccattgccagaggcgattcgttttgcccatgctgccgctgcgattgccgtaacacgtaaaggcgcacaaccttccgtaccgtggcgtgaagagatcgacgcatttttagacaggcagaggtgacgcttggctacaatgaaagatgttgcccgcctggcgggcgtttctaccagtacagtttctcacgttatcaataaagatcgcttcgtcagtgaagcgattaccgccaaagttgaagcggcgattaaagaactcaattacgcgccaagtgctctggcgcgtagcctcaaactcaatcaaacacataccattggcatgttgatcactgccagtaccaatcctttctatagtgaactggtgcgtggcgttgaacgcagctgcttcgaacgcggttatagtctcgtcctttgcaataccgaaggcgatgaacagcggatgaatcgcaatctggaaacgctgatgcaaaaacgcgttgatggcttgctgttactgtgcaccgaaacgcatcaacctagccgtgaaatcatgcaacgttatccgacagtgcctactgtgatgatggactgggctccgttcgatggcgacagcgatcttattcaggataacagcttgctgggcggagacttagcaacgcaatatctgatcgataaaggtcatacccgtatcgcctgtattaccggcccgctggataaaactccggcgcgcctgcggttggaaggttatcgggcggcgatgaaacgtgcgggtctcaacattcctgatggctatgaagtcactggtgattttgaatttaacggcgggtttgacgctatgcgccaactgctaagtcatccgctgcgtcctcaggccgtctttaccggaaatgacgctatggctgttggcgtttaccaggcgttatatcaggcagagttacaggttccgcaggatatcgcggtgattggctatgacgatatcgaactggcaagctttatgacgccaccattaaccactatccaccaaccgaaagatgaactgggggagctggcgattgatgtactcatccatcggataacccagccgacccttcagcaacaacgattacaacttactccgattctgatggaacgcggtagcgcttaattactcgctttcacttggaacgcggttcggcttagatttacgctgtcttttgatcaaattattaccatcggttgttttcagaagcatgaacattgctgcactagcaacagtaataatgcccattgtgataaacgtatagtggaattgttcgacagtcgttgtgccttccattccttcataaacgcgaaggacggccgcacttacagcaacgcctaaactaatgctcagttgctgcgtgaccgccagaacactgttaccgctgctggcattgtcatcggtcagatcggcaagtgtgatggtattcatcgcggtaaactgcgtgctcatagccatccctaatataaacaacggcaagatcagcatccatatagccattgctggactttgcaaagagaactgagcgatcattagcccaataatcaccgtgatccccactaacgtatggcgatagcccagacgacgtaagacttgggtaaccatgctttttgcaataatggaacctaacgctgtcggtgccatcatacagccagcaataaacgcctgataaccaaatcctacctgtaacatcaatggcataaggaacggtacacagccggtccccagacgggttgcaatattgcctacgataccgatgctgaaagtgcgggttttaaataaatctaaactaattaatgggtttggcgtgcgtcgtgcatggagaatatagagaagcagtaacccgatgctggtgacaattaccgtcaaggcaatccagctggcgacaatcttttccccgaatagctctattccgctactgaagagaacaaggctgaggccaaacagcaaaaagccagtgatatcgaatctgcgtcgtgcggtggtgaaattgggcatatgtttgcgcgcgtaaagaaggcccgcaatacctatggggatattgattaaaaatatccagtgccaggttgcccaggtgaccagcacgccgccaagaacggggcctaaaattggccccaccagacccggcatggcgacaaaattcaatactggaagaagttcattacgaggataagcgcgcagtaaggccagccgagcaacaggcatcatcattgcgccgcctatcccctgaataacccggaagacaaccagctgtggtaggctattagaaagtgcgcaggccagagaacccaatgtgaacagactcacggcaagggtaaaaatgcgacgcgtaccgaagcgatcggctagccatccgcttaccggaataagcatcgccaccgtcagcgtataactgatgatggcactttgcatcgcgagaggagaacgattaaggctatgagcgattgcgggtaaggcggtattaagaatagtggcatcaagtgcctgcatgaagaaggccatcgccgcgatccacggcaaacccgccatactgcgcttctttttatcgctcattcaatgtcctgttatcgggttatcacttatcaggactgcgtagcagcgcctgacaagctttaaatgccgcgtcgccatcgctttggataatcgcatcgacaatcgcctgatgcagatccagctttatcactgtgtcgctggtaatactcgtgaagtaagtgtgataaacgctatggaataggctggcgaaactggtcaaaaacggattggcgctcatttcatagatatgctcatgccaggccatatcgacttcgatccagcgttcacggcgaaagttctcttttaatgccgccatttcggccattaacgtattgagatgcgctttctgttccgcggtgccaaccgttgctgccagtaggcaggcttgcggctccagacagatacgcataaccagaaagtgatcgatgacctgatgaaagttctcttctgtcatccaccaggtaagcaattcctgatcaagaaaattccagttgctttgtggcatgacccgagtaccaattcgcggtcgcggtaaaaccatcccttttgccgttaacgttttgaccgcttcgcgtaccgctgtacgactcactccaaattgctcgcccagctcaatctcaccgggcaaaatggtgccgggttcatattcaccttttaagatccgttgcgccagcttctcagccagaacatagctaaggtttttctgtgcagctaactgttgtgcgcttaaaggcattacttatcttcctttttctttttattcctccttagtatgccaccaggaagtgtgattacggttgcaaaaacggcaaattgcttgttttatggcacattaacggggcttttgctgaaaaaatgcgcggtcagaaaattattttaaatttcctcttgtcaggccggaataactccctataatgcgccaccactgacacggaacaacggcaaacacgccgccgggtcagcggggttctcctgagaactccggcagagaaagcaaaaataaatgcttgactctgtagcgggaaagcgtattatgcacaccccgcgccgctgagaaaaagcaaagcggcactgctctttaacaatttatcagacaatctgtgtgggcactcgaagatacggattcttaacgtcgcaagacgaaaaatgaataccaagtctcaagagtgaacacgtaattcattacgaagtttaattctttgagcatcaaacttttaaattgaagagtttgatcatggctcagattgaacgctggcggcaggcctaacacatgcaagtcgaacggtaacaggaaacagcttgctgtttcgctgacgagtggcggacgggtgagtaatgtctgggaaactgcctgatggagggggataactactggaaacggtagctaataccgcataacgtcgcaagaccaaagagggggaccttcgggcctcttgccatcagatgtgcccagatgggattagctagtaggtggggtaacggctcacctaggcgacgatccctagctggtctgagaggatgaccagccacactggaactgagacacggtccagactcctacgggaggcagcagtggggaatattgcacaatgggcgcaagcctgatgcagccatgccgcgtgtatgaagaaggccttcgggttgtaaagtactttcagcggggaggaagggagtaaagttaatacctttgctcattaacgttacccgcagaagaagcatcggctaactccgtgccagcagccgcggtaatacggagggtgcaagcgttaatcggaattactgggcgtaaagcgcacgcaggcggtttgttaagtcagatgtgaaatccccgggctcaacctgggaactgcatctgatactggcaagcttgagtctcgtagaggggggtagaattccaggtgtagcggtgaaatgcgtagagatctggaggaataccggtggcgaaggcggccccctggacgaagactgacgctcaggtgcgaaagcgtggggagcaaacaggattagataccctggtagtccacgccgtaaacgatgtcgacttggaggttgtgcccttgaggcgtggcttccggagctaacgcgttaagtcgaccgcctggggagtacggccgcaaggttaaaactcaaatgaattgacgggggcccgcacaagcggtggagcatgtggtttaattcgatgcaacgcgaagaaccttacctggtcttgacatccacggaagttttcagagatgagaatgtgccttcgggaaccgtgagacaggtgctgcatggctgtcgtcagctcgtgttgtgaaatgttgggttaagtcccgcaacgagcgcaacccttatcctttgttgccagcggtccggccgggaactcaaaggagactgccagtgataaactggaggaaggtggggatgacgtcaagtcatcatggcccttacgaccagggctacacacgtgctacaatggcgcatacaaagagaagcgacctcgcgagagcaagcggacctcataaagtgcgtcgtagtccggattggagtctgcaactcgactccatgaagtcggaatcgctagtaatcgtggatcagaatgccacggtgaatacgttcccgggccttgtacacaccgcccgtcacaccatgggagtgggttgcaaaagaagtaggtagcttaaccttcgggagggcgcttaccactttgtgattcatgactggggtgaagtcgtaacaaggtaaccgtaggggaacctgcggttggatcacctccttaccttaaagaagcgttctttgcagtgctcacacagattgtctgataggaagtgaaaagcaaggcgtcttgcgaagcagactgatacgtccccttcgtctagaggcccaggacaccgccctttcacggcggtaacaggggttcgaatcccctaggggacgccacttgctggtttgtgagtgaaagtcacctgccttaatatctcaaaactcatcttcgggtgatgtttgagatatttgctctttaaaaatctggatcaagctgaaaattgaaacactgaacaacgaaagttgttcgtgagtctctcaaattttcgcaacacgatgatgaatcgaaagaaacatcttcgggttgtgaggttaagcgactaagcgtacacggtggatgccctggcagtcagaggcgatgaaggacgtgctaatctgcgataagcgtcggtaaggtgatatgaaccgttataaccggcgatttccgaatggggaaacccagtgtgtttcgacacactatcattaactgaatccataggttaatgaggcgaaccgggggaactgaaacatctaagtaccccgaggaaaagaaatcaaccgagattcccccagtagcggcgagcgaacggggagcagcccagagcctgaatcagtatgtgtgttagtggaagcgtctggaaaggcgcgcgatacagggtgacagccccgtacacaaaaatgcacatattgtgagctcgatgagtagggcgggacacgtggtatcctgtctgaatatggggggaccatcctccaaggctaaatactcctgactgaccgatagtgaaccagtaccgtgagggaaaggcgaaaagaaccccggcgaggggagtgaaaaagaacctgaaaccgtgtacgtacaagcagtgggagcacgcttaggcgtgtgactgcgtaccttttgtataatgggtcagcgacttatattctgtagcaaggttaaccgaataggggagccgaagggaaaccgagtcttaactgggcgttaagttgcagggtatagacccgaaacccggtgatctagccatgggcaggttgaaggttgggtaacactaactggaggaccgaaccgactaatgttgaaaaattagcggatgacttgtggctgggggtgaaaggccaatcaaaccgggagatagctggttctccccgaaagctatttaggtagcgcctcgtgaattcatctccgggggtagagcactgtttcggcaagggggtcatcccgacttaccaacccgatgcaaactgcgaataccggagaatgttatcacgggagacacacggcgggtgctaacgtccgtcgtgaagagggaaacaacccagaccgccagctaaggtcccaaagtcatggttaagtgggaaacgatgtgggaaggcccagacagccaggatgttggcttagaagcagccatcatttaaagaaagcgtaatagctcactggtcgagtcggcctgcgcggaagatgtaacggggctaaaccatgcaccgaagctgcggcagcgacgcttatgcgttgttgggtaggggagcgttctgtaagcctgcgaaggtgtgctgtgaggcatgctggaggtatcagaagtgcgaatgctgacataagtaacgataaagcgggtgaaaagcccgctcgccggaagaccaagggttcctgtccaacgttaatcggggcagggtgagtcgacccctaaggcgaggccgaaaggcgtagtcgatgggaaacaggttaatattcctgtacttggtgttactgcgaaggggggacggagaaggctatgttggccgggcgacggttgtcccggtttaagcgtgtaggctggttttccaggcaaatccggaaaatcaaggctgaggcgtgatgacgaggcactacggtgctgaagcaacaaatgccctgcttccaggaaaagcctctaagcatcaggtaacatcaaatcgtaccccaaaccgacacaggtggtcaggtagagaataccaaggcgcttgagagaactcgggtgaaggaactaggcaaaatggtgccgtaacttcgggagaaggcacgctgatatgtaggtgaagcgacttgctcgtggagctgaaatcagtcgaagataccagctggctgcaactgtttattaaaaacacagcactgtgcaaacacgaaagtggacgtatacggtgtgacgcctgcccggtgccggaaggttaattgatggggtcagcgcaagcgaagctcttgatcgaagccccggtaaacggcggccgtaactataacggtcctaaggtagcgaaattccttgtcgggtaagttccgacctgcacgaatggcgtaatgatggccaggctgtctccacccgagactcagtgaaattgaactcgctgtgaagatgcagtgtacccgcggcaagacggaaagaccccgtgaacctttactatagcttgacactgaacattgagccttgatgtgtaggataggtgggaggctttgaagtgtggacgccagtctgcatggagccgaccttgaaataccaccctttaatgtttgatgttctaacgtggacccgtgatccgggttgcggacagtgtctggtgggtagtttgactggggcggtctcctcctaaagagtaacggaggagcacgaaggttggctaatcctggtcggacatcaggaggttagtgcaatggcataagccagcttgactgcgagcgtgacggcgcgagcaggtgcgaaagcaggtcatagtgatccggtggttctgaatggaagggccatcgctcaacggataaaaggtactccggggataacaggctgataccgcccaagagttcatatcgacggcggtgtttggcacctcgatgtcggctcatcacatcctggagctgaagtaggtcccaagggtatggctgttcgccatttaaagtggtacgcgagctgggtttagaacgtcgtgagacagttcggtccctatctgccgtgggcgctggagaactgaggggggctgctcctagtacgagaggaccggagtggacgcatcactggtgttcgggttgtcatgccaatggcactgcccggtagctaaatgcggaagagataagtgctgaaagcatctaagcacgaaacttgccccgagatgagttctccctgactccttgagagtcctgaaggaacgttgaagacgacgacgttgataggccgggtgtgtaagcgcagcgatgcgttgagctaaccggtactaatgaaccgtgaggcttaaccttacaacgccgaagatgttttggcggatgagagaagattttcagcctgatacagattaaatcagaacgcagaagcggtctgatgaaacagaatttgcctggcggccgtagcgcggtggtcccacctgaccccatgccgaactcagaagtgaaacgccgtagcgccgatggtagtgtggggtctccccatgcgagagtagggaactgccaggcatcaaattaagcagtaagccggtcataaaaccggtggttgtaaaagaattcggtggagcggtagttcagtcggttagaatacctgcctgtcacgcagggggtcgcgggttcgagtcccgtccgttccgccaccctaattaggggcgtagttcaattggtagagcaccggtctccaaaaccgggtgttgggagttcgagtctctccgcccctgccagaaatcatccttagcgaaagctaaggattttttttatctgaaataaccctctccgaagtaaatccttctaccggcatccttgccagccattcatattaatacacttcatccagcacgttaattttcaaaagatcgcgaatcaacgcatttttatcgctattttgcagccatatggcataaagcggccgactaagtgttgtgctatcgacaacggtatgcaggccgccttttttacgcgcccagctgacgggtagccaggtgcaaccattaagcatcgcaatctgttgctgtgccagttcagcagaactggttgtcagaatgggcacttcgtcagcaccgatcaaacctgcctcatgctgttgaaaatctggcccccactcaagtcgcagataattaagatctccctttagtttactaggggcactggtataaagcgctaaagtgaaatatcccagcaactgactactaaattcgtccattttgggcgcttcagtggtaataagaagatcaagctggcgttcatgcagctgttttaccagagactgccgttgggcaattcgcgcttcgaactgtaagcctgtatgggcatcctgattttgatacaagcgtcccagccactgattaagcatacattcccacaagctggcgctggcaccgatagaaaactcgttatgtcgactggtatgcgccacctccttacgggcggcctgccaggtgctcatgagcgtttctgcataaggcagtagtttttcaccggcagcggttaaacggatattgtttctgtggcgggtgaaaaggttcacacccagttgattttccagttgtctgattcgaaagctcactgcactctgggtcagatagaggctttcagccgctcgaccaaagtgacgcgttcggctaacttccaggaaagtttttaacaattccgtatccacagtgctctccgcaaaattatttgtcgttatgatttaaatgttttgttttacactctgtcaagcgtaactaatactccgcgccataactagctcggtcaaagaattaggagcgtgcaggatggcggaaagctttacgacgactaatcgatatttcgacaataaacattatccacgtggattctctcgtcatggtgatttcaccatcaaagaggcacaactgcttgagcgtcatggttatgccttcaatgagttggatcttggcaaacgcgagccggttaccgaggaagagaaactcttcgtagcagtatgccgtggcgaacgtgagccagtgacagaagcagaacgcgtgtggtccaagtatatgacgcgtattaagcgtccaaaacgttttcacaccctttccggcggtaaaccgcaggttgaaggtgctgaagactacaccgattctgacgattaataaaaagggcgaaatgccctttttttatgtcagtagtttctgcagatggatgagcaaacggtcaatcgctcgatagctaactgcctcctgcaaatgctgacgtgtgataatgtcagactgatcaatatcagcaatggttcgtgcaactttcaataaccgctgccaggcacgaatgcttaaccccagatggatcagtgttccttccaaccacatcgcatcttcgctctcaagtttgcagaattggcgtatttccggactatccagccaggcattcagtttattctgccgcttaaattggcgctctctggcggccattacgcgttgtttaacggtggcgctgctttctcccggcactaccgttttactcaaaatgccggggggtggtaatgggatctccagactgagatcgaagcggtcgagaaagggcccgctgagccggttgagataacgtaatgtctgttctggcgtgcagcggttatggtttccctgataatgtccggtagggctgggattcatcgccgcaacaagctggaaacgggctggataggttatttttgctcgtgtgcgactaagatggatctgcccggattcaatcggctctcgcaaggcatccagtgtacgccgttcaaattcaggtagctcatcaagaaaaagcacgccgttatgcgccaggctaatttcaccgggccctggaattgcgccaccgcctaccatcgcagttaagcttgcactgtgatgaggactgcggaacgggcgctgccgccattgtttttgtacactttcagcatttaccagacttaatatcgcagcactctccagtgcctcttcattgcttaaatctggcaacaggccattaatacggctggcgagcattgttttacctgttcccggcggcccaatcagtaaaaggttgtgcccgccagcagcggtaatttccagtcctcgctttccttgttcctgaccgataacatcactgagatcatgttgtagcgcccgggatactgcatcagttggtttcgggcgttcgagagcgtgcttaccttccagaaacgcacagacagcttgcagatgatcggctatcaggcatccttcaccgttaattagccccacttcatcttcgttatctttcgcgacgataatttttctgccgctcttaatagcttcagttgcactggagattgcgccgggaacgccacgcagagcgcctgtaagcgccagttctccgactaattcatattcatctaacttattggctgtaagctgttcactggccgccagcaacgcaatggcgataggtaaatcatatcgtcccccttcttttggcagatcagctggagccaggttgatggtgatttttttcgccggatattcatatccgctattgataatggcgctgcgcacgcgatcgcgagcttcttttaccgttgtttctggtaagcccaccatcgttaagccgggtagacctttactgatatgtacctcaacagtgatcgggggcgcatttactcccagggctgcgcgggtatgaacaatactcagactcataagccctccttgagtcaccattatgtgcataagatatcgctgctgtagcccgctaattcgtgaattttagtggctgattcctgtttatttgtgcaagtgaagttgagttgttctggcggtggaatgatgctcgcaaaaatgcagcggacaaaggatgaactacgaggaagggaacaacattcatactgaaattgaatttttttcactcactattttatttttaaaaaacaacaatttatattgaaattattaaacgcatcataaaaatcggccaaaaaatatcttgtactatttacaaaacctatggtaactctttaggcattccttcgaacaagatgcaagaaaagacaaaatgacagcccttctacgagtgattagcctggtcgtgattagcgtggtggtgattattatcccaccgtgcggggctgcacttggacgaggaaaggcttaaagatcaagccttaacgaactaagacccccgcaccgaaaggtccgggggttttttttgaccttaaaaacataaccgaggagcagacaatgaataacagcacaaaattctgtttctcaagattcaggacggggaactaactatgaatggcgcacagtgggtggtacatgcgttgcgggcacagggtgtgaacaccgttttcggttatccgggtggcgcaattatgccggtttacgatgcattgtatgacggcggcgtggagcacttgctatgccgacatgagcagggtgcggcaatggcggctatcggttatgctcgtgctaccggcaaaactggcgtatgtatcgccacgtctggtccgggcgcaaccaacctgataaccgggcttgcggacgcactgttagattccatccctgttgttgccatcaccggtcaagtgtccgcaccgtttatcggcactgacgcatttcaggaagtggatgtcctgggattgtcgttagcctgtaccaagcacagctttctggtgcagtcgctggaagagttgccgcgcatcatggctgaagcattcgacgttgcctgctcaggtcgtcctggtccggttctggtcgatatcccaaaagatatccagttagccagcggtgacctggaaccgtggttcaccaccgttgaaaacgaagtgactttcccacatgccgaagttgagcaagcgcgccagatgctggcaaaagcgcaaaaaccgatgctgtacgttggcggtggcgtgggtatggcgcaggcagttccggctttgcgtgaatttctcgctgccacaaaaatgcctgccacctgtacgctgaaagggctgggcgcagtagaagcagattatccgtactatctgggcatgctggggatgcacggcaccaaagcggcaaacttcgcggtgcaggagtgtgacctgctgatcgccgtgggcgcacgttttgatgaccgggtgaccggcaaactgaacaccttcgcgccacacgccagtgttatccatatggatatcgacccggcagaaatgaacaagctgcgtcaggcacatgtggcattacaaggtgatttaaatgctctgttaccagcattacagcagccgttaaatcaatgactggcagcaacactgcgcgcagctgcgtgatgaacattcctggcgttacgaccatcccggtgacgctatctacgcgccgttgttgttaaaacaactgtcggatcgtaaacctgcggattgcgtcgtgaccacagatgtggggcagcaccagatgtgggctgcgcagcacatcgcccacactcgcccggaaaatttcatcacctccagcggtttaggtaccatgggttttggtttaccggcggcggttggcgcacaagtcgcgcgaccgaacgataccgttgtctgtatctccggtgacggctctttcatgatgaatgtgcaagagctgggcaccgtaaaacgcaagcagttaccgttgaaaatcgtcttactcgataaccaacggttagggatggttcgacaatggcagcaactgttttttcaggaacgatacagcgaaaccacccttactgataaccccgatttcctcatgttagccagcgccttcggcatccatggccaacacatcacccggaaagaccaggttgaagcggcactcgacaccatgctgaacagtgatgggccatacctgcttcatgtctcaatcgacgaacttgagaacgtctggccgctggtgccgcctggcgccagtaattcagaaatgttggagaaattatcatgatgcaacatcaggtcaatgtaagcgctcgcttcaatccagaaaccttagaacgtgttttacgcgtggtgcgtcatcgtggtttccacgtctgcagtatgaatatggccgccgccagcgatgcacaaaatataaatatcgaattgaccgttgccagcccacggagcgtcgacttactgtttagtcagttaaataaactggtggacgtcgcacacgttgccatctgccagagcacaaccacaagtcaacaaatccgcgcctgagcgcaaaaggaatataaaaatgaccacgaagaaagctgattacatttggttcaatggggagatggttcgctgggaagacgcgaaggtgcatgtgatgagccacgcgctgcactatggcactagcgtttttgaaggcatccgttgctacgacagccacaaaggaccggttgtattccgccatcgtgagcatatgcagcgtctgcatgactccgccaaaatctatcgcttcccggttagccagagcattgatgagctgatggaagcttgtcgtgacgtgatccgcaaaaacaatctcaccagcgcctatatccgtccgctgatcttcgtcggtgatgttggcatgggagtaaacccgccagcgggatacagtaccgacgtgattatcgctgctttcccgtggggagcgtatctgggcgcagaagcgctggagcaggggatcgatgcgatggtttcctcctggaaccgcgcagcaccaaacaccatcccgacggcggcaaaagccggtggtaactacctctcttccctgctggtgggtagcgaagcgcgccgccacggttatcaggaaggtatcgcgctggatgtgaacggttatatctctgaaggcgcaggcgaaaacctgtttgaagtgaaagatggtgtgctgttcaccccaccgttcacctcctccgcgctgccgggtattacccgtgatgccatcatcaaactggcgaaagagctgggaattgaagtacgtgagcaggtgctgagccgcgaatccctgtacctggcggatgaagtgtttatgtccggtacggcggcagaaatcacgccagtgcgcagcgtagacggtattcaggttggcgaaggccgttgtggcccggttaccaaacgcattcagcaagccttcttcggcctcttcactggcgaaaccgaagataaatggggctggttagatcaagttaatcaataaatacaaaaaatgggacggcacgcaccgtcccatttacgagacagacactgggagtaaataaagtatgcctaagtaccgttccgccaccaccactcatggtcgtaatatggcgggtgctcgtgcgctgtggcgcgccaccggaatgaccgacgccgatttcggtaagccgattatcgcggttgtgaacagcttcacccaatttgtaccgggtcacgtccatctgcgcgatctcggtaaactggtcgccgaacaaattgaagcggctggcggcgttgccaaagagttcaacaccattgcggtggatgatgggattgccatgggccacggggggatgctttatagtctgccatctcgcgaactgatcgctgattccgttgagtatatggtcaacgcccactgcgccgacgccatggtctgcatctctaactgcgacaaaatcaccccggggatgctgatggcttccctgcgcctgaatattccggtgatctttgtttccggcggcccgatggaggccgggaaaaccaaactttccgatcagatcatcaagctcgatctggttgatgcgatgatccagggcgcagacccgaaagtatctgactcccagagcgatcaggttgaacgttccgcgtgtccgacctgcggttcctgctccgggatgtttaccgctaacagtatgaactgcctgaccgaagcgctgggcctgagccagccgggcaacggcagcctgctggcaacccacgccgaccgtaagcagctgttccttaatgctggtaaacgcattgttgaattgaccaaacgttattacgagcaaaacgacgaaagtgcactgccgcgtaatatcgccagtaaggcggcgtttgaaaacgccatgacgctggatatcgcgatgggtggaagcactaacaccgtacttcacctgctggcggcggcgcaggaagcggaaatcgacttcaccatgagtgatatcgataagctttcccgcaaggttccacagctgtgtaaagttgcgccgagcacccagaaataccatatggaagatgttcaccgtgctggtggtgttatcggtattctcggcgaactggatcgcgcggggttactgaaccgtgatgtgaaaaacgtacttggcctgacgttgccgcaaacgctggaacaatacgacgttatgctgacccaggatgacgcggtaaaaaatatgttccgcgcaggtcctgcaggcattcgtaccacacaggcattcagccaagattgccgttgggatacgctggacgacgatcgcgccaatggctgtatccgcagcctggaacacgcctacagcaaagacggcggcctggcggtgctctacggtaactttgcggaaaacggctgcatcgtgaaaacggcaggcgtcgatgacagcatcctcaaattcaccggcccggcgaaagtgtacgaaagccaggacgatgcggtagaagcgattctcggcggtaaagttgtcgccggagatgtggtagtaattcgctatgaaggcccgaaaggcggtccggggatgcaggaaatgctctacccaaccagcttcctgaaaagtatgggtctcggcaaagcctgtgcgctgatcaccgacggtcgtttctctggtggcacctctggtctttccatcggccacgtcagtccggaagcggcaagcggcggcagcattggcctgattgaagatggtgacctgatcgctatcgacatcccgaaccgtggcattcagttacaggtaagcgatgccgaactggcggcgcgtcgtgaagcgcaggacgctcgaggtgacaaagcctggacgccgaaaaatcgtgaacgtcaggtctcctttgccctgcgtgcttatgccagcctggcaaccagcgccgacaaaggcgcggtgcgcgataaaagcaaactggggggttaataatggctgacagccaacccctgtccggtgctccggaaggtgccgaatatttaagagcagtgctgcgcgcgccggtttacgaggcggcgcaggttacgccgctacaaaaaatggaaaaactgagcagccgtcttgataacgtcattctggtgaagcgcgaagatcgccagccagtgcacagctttaagctgcgcggcgcatacgccatgatggcgggcctgacggaagaacagaaagcgcacggcgtgatcactgcttctgcgggtaaccacgcgcagggcgtcgcgttttcttctgcgcggttaggcgtgaaggccctgatcgttatgccaaccgccaccgccgacatcaaagtcgacgcggtgcgcggcttcggcggcgaagtgctgctccacggcgcgaactttgatgaagcgaaagccaaagcgatcgaactgagtcagcagcaggggttcacctgggtgccgccgttcgaccatccgatggtgattgccgggcaaggcacgctggcgctggaactgctccagcaggacgcccatctcgaccgcgtatttgtgccagtcggcggcggcggtctggctgctggcgtggcggtgctgatcaaacaactgatgccgcaaatcaaagtgatcgccgtagaagcggaagactccgcctgcctgaaagcagcgctggatgcgggtcatccggttgatctgccgcgcgtagggctatttgctgaaggcgtagcggtaaaacgcatcggtgacgaaaccttccgtttatgccaggagtatctcgacgacatcatcaccgtcgatagcgatgcgatctgtgcggcgatgaaggatttattcgaagatgtgcgcgcggtggcggaaccctctggcgcgctggcgctggcgggaatgaaaaaatatatcgccctgcacaacattcgcggcgaacggctggcgcatattctttccggtgccaacgtgaacttccacggcctgcgctacgtcagtgaacgctgcgaactgggcgaacagcgtgaagcgttgttggcggtgaccattccggaagaaaaaggcagcttcctcaaattctgccaactgcttggcgggcgtagcgtcaccgagttcaactaccgttttgccgatgccaaaaacgcctgcatctttgtcggtgtgcgcctgagccgcggcctcgaagagcgcaaagaaattttgcagatgctcaacgacggcggctacagcgtggttgatctctccgacgacgaaatggcgaagctacacgtgcgctatatggtcggcggacgtccaagccatccgttgcaggaacgcctctacagcttcgaattcccggaaagtccgggcgcgctgctgcgcttcctcaacacgctgggtacgtactggaacatttctttgttccactatcgcagccatggcaccgactacgggcgcgtactggcggcgttcgaacttggcgaccatgaaccggatttcgaaacccggctgaatgagctgggctacgattgccacgacgaaaccaataacccggcgttcaggttctttttggcgggttaaggaaaaatgcctgatagcgcttcgcttatcaggcctacccgcgcgacaacgtcatttgtggttcggcaaaatcttccagaatgcctcaattagcggctcatgtagccgctttttctgcgcacacacgcccagctcaaacggcgttttctcatcgctgcgctctaaaatcatcacgcggttacgcaccggttcggggctgttttccagcaccacttccggcaacaatgccacgccacagccgagtgccaccatgcttaccatcgcttcatgcccgccaaccgtggcgtaaatcatcgggttactgattttattgcgtcgaaaccacagttcaatgcggcggcgtaccggcccctgatcggccataataaacggcaccgtactccagtccggcttctctacgctcacctgattacgcaccgggcagggcagcgcgggggcaatcagcactactgccagattctccagcatgctaaacgccactgcgccgggcaaggtttccggtttacccgcaatcgccagatccgcttcaccagtgaccaccttttccatcgcatctgccgcatcaccagtagtaagtttaatctccacgctcgggtgttccgcgcggaagcgatccagaatcggcggcagatggctgtaggcagcggtcacgctgcagaagatatgtaattcgccagagaggctcggcccttgctgatcgatggtgtggcgcaactgctgatactgcaacagcgtttgctgggcgaaaacgcgcagctcttcgcccgcttcagtcagcgtcaccgtgcggttatcgcgcacaaacagcggctgaccgagatcttcttccaggcgctgaatctgccgactgagcgtggatgggctaacgtgcatcgcccgcgcgctgcggccaaaatggcggctttccgccagatgcaggaaggttttcagatcgcgtaaatccacagggacagccctcgatgttgacgttgcaaaaattgcaatgtgacgttgtgaatatatcaatttccgcaataaatttcctgtcatatagtgaattcaatctcgcaaacgcgaaccgaacaataagaagcacaacatcacgaggaatcaccatggctaactacttcaatacactgaatctgcgccagcagctggcacagctgggcaaatgtcgctttatgggccgcgatgaattcgccgatggcgcgagctaccttcagggtaaaaaagtagtcatcgtcggctgtggcgcacagggtctgaaccagggcctgaacatgcgtgattctggtctcgatatctcctacgctctgcgtaaagaagcgattgccgagaagcgcgcgtcctggcgtaaagcgaccgaaaatggttttaaagtgggtacttacgaagaactgatcccacaggcggatctggtgattaacctgacgccggacaagcagcactctgatgtagtgcgcaccgtacagccactgatgaaagacggcgcggcgctgggctacagccacggtttcaacatcgtcgaagtgggcgagcagatccgtaaagatatcaccgtagtgatggttgcgccgaaatgcccaggcaccgaagtgcgtgaagagtacaaacgtgggttcggcgtaccgacgctgattgccgttcacccggaaaacgatccgaaaggcgaaggcatggcgattgccaaagcctgggcggctgcaaccggtggtcaccgtgcgggtgtgctggaaagctccttcgttgcggaagtgaaatctgacctgatgggcgagcaaaccatcctgtgcggtatgttgcaggctggctctctgctgtgcttcgacaagctggtggaagaaggtaccgatccagcatacgcagaaaaactgattcagttcggttgggaaaccatcaccgaagcactgaaacagggcggcatcaccctgatgatggaccgtctctctaacccggcgaaactgcgtgcttatgcgctttctgaacagctgaaagagatcatggcacccctgttccagaaacatatggacgacatcatctccggcgaattctcttccggtatgatggcggactgggccaacgatgataagaaactgctgacctggcgtgaagagaccggcaaaaccgcgtttgaaaccgcgccgcagtatgaaggcaaaatcggcgagcaggagtacttcgataaaggcgtactgatgattgcgatggtgaaagcgggcgttgaactggcgttcgaaaccatggtcgattccggcatcattgaagagtctgcatattatgaaagtctgcacgagctgccgctgattgccaacaccatcgcccgtaagcgtctgtacgaaatgaacgtggttatctctgataccgctgagtacggtaactatctgttctcttacgcttgtgtgccgttgctgaaaccgtttatggcagagctgcaaccgggcgacctgggtaaagctattccggaaggcgcggtagataacgggcaactgcgtgatgtgaacgaagcgattcgcagccatgcgattgagcaggtaggtaagaaactgcgcggctatatgacagatatgaaacgtattgctgttgcgggttaagtgcgcgctgatgccctcaccccgaccctctcccacagggagagggagaaaacactcaaggccttctcctggagaaggccttgctattagttgcggtacagcaccttaatgatgtgatatccgaactgggtgtgcagcgggccggtcggctccagtaccggacaagagaaaaccactttatcgaacgccggaaccatctgaccctggcggaattcacctaaatcaccgccgcgtttgccacttgggcaaatggagtgtttcttcgccagcttgccgaaatcggccccgttcttaatctgctcgagaagatccagagccagtttctcttcttttacaaggatatgcagtgctgctgctgtttttgccatgatcgtgccttgagtgaataattgtcaggcggcgattttagcatgatccgcagatgctaacgtaattgtcagtcagggagtggctggtacatatatggcaaaagcccggaaaatccgggcttcgcaggtccctcaaggggagaaaacttagggcctctatgggctacaaagtcattatcggggatggttattttattgtcaatttatgaggcttatggcattgatactcttgatgaccgccctctgtatgtctgcaaccaactcatgtggcaaacattgattaagataccctctgtaagtccttgctctgtttaatctgtttcgactgacttgttgtaccaggtcggctttggcccaacgaatctgctgatcaaagaattgcaggtcattgataacattactggctatttcaacatgcattccacgttttaacttgtctggtcggctgtggttgataatggaacgacgatgcatgcgttgccattaatttttccgttgagcacgacaactaacctgttttttatcatttcaggaggaatgcggccatcgtaatacgtcgtgctgaacggtccattttggctaacaggatagttaccaaagttgcattccagtatttcaccaaccttagggctgaaattaatcgccacgagtaaacctctccttagtaaactctgaaaaagtaataacacaacgttacgacccgatattttctaagtctaatggattcacgatgaactccgatttcggtcttctctctctgatttaaacatccgcagccaaccggttagcggcttacacgcggtcacattcaaatgcgattctgctacaatcctccccccgttcgaagattgagcaatacacctatgcgtctaaaccccggccaacaacaagctgtcgaattcgttaccggcccctgcctggtgctggcgggcgcgggttccggtaaaactcgtgttatcaccaataaaatcgcccatctgatccgcggttgcggttatcaggcgcggcacattgcggcggtgacctttactaataaagcagcgcgcgagatgaaagagcgtgtagggcagacgctggggcgcaaagaggcgcgtgggctgatgatctccactttccatacgttggggctggatatcatcaaacgcgagtatgcggcgcttgggatgaaagcgaacttcagcttgtttgacgataccgatcagcttgctttgcttaaagagttgaccgaggggctgattgaagatgacaaagttctcctgcaacaactgattagcaccatctctaactggaagaatgatctcaaaacaccgtcccaggcggcagcaagtgcgattggcgagcgggaccgtatttttgcccattgttatgggctgtatgatgcacacctgaaagcctgtaacgttctcgacttcgatgatctgattttattgccgacgttgctgctgcaacgcaatgaagaagtccgcaagcgctggcagaacaaaattcgctatctgctggtggatgagtatcaggacaccaacaccagccagtatgagctggtgaaactgctggtgggcagccgcgcgcgctttaccgtggtgggtgacgatgaccagagcatctactcctggcgcggtgcacgtccgcaaaacctggtgctgctgagtcaggattttccggcgctgaaggtgattaagcttgagcagaactatcgctcttccgggcgtattctgaaagcggcgaacatcctgatcgccaataacccgcacgtctttgaaaagcgtctgttctccgaactgggttatggcgcggagctaaaagtattaagcgcgaataacgaagaacatgaggctgagcgcgttactggcgagctgatcgcccatcacttcgtcaataaaacgcagtacaaagattacgccattctttatcgcggtaaccatcagagccgggtgtttgaaaaattcctgatgcaaaaccgcatcccgtacaaaatatctggtggtacgagctttttctctcgtcctgaaatcaaggacttgctggcttatctgcgcgtgctgactaacccggacgatgacagcgcatttctgcgtatcgttaacacgccgaagcgagagattggcccggctacgctgaaaaagctgggtgagtgggcgatgacgcgcaataaaagcatgtttaccgccagctttgatatgggcctgagtcagacgcttagcggacgtggttatgaagcattgacccgcttcactcactggttggcagaaatccagcgtctggcggagcgggagccgattgccgcggtgcgtgatctgatccatggcatggattatgaatcctggctgtacgaaacaagccccagcccgaaagccgccgaaatgcgcatgaagaacgtcaaccaactgtttagctggatgacggagatgctggaaggcagtgaactggatgagccgatgacgctcacccaggtggtgacgcgctttactttgcgcgacatgatggagcgtggtgagagtgaagaagagctggatcaggtgcaactgatgactctccacgcgagcaaagggctggagtttccttatgtctacatggtcggtatggaagaagggtttttgccgcaccagagcagcatcgatgaagataatatcgatgaggagcggcggctggcctatgtcggcattacccgcgcccagaaggaattgacctttacgctgtgtaaagaacgccgtcagtacggcgaactggtgcgcccggagccgagccgctttttgctggagctgccgcaggatgatctgatttgggaacaggagcgcaaagtggtcagcgccgaagaacggatgcagaaagggcaaagccatctggcgaatctgaaagcgatgatggcggcaaaacgagggaaataatcaaggccggaaaagatgcgtcagcatcgcatccggcacttactcattaatgcacttccagcggccagtggacatagctctgccactggctttcctgagcaataatctctttacccagcggatgttgggttagccaaccttgcggaagcgtcaaggtcaacagttcatggttagcctgtaatgtcatctctggcacgagatcgtcacggcgacggctggcaaaaatgatggccaggcgtagtaaacggcagagttgttctgcgacgcgcggcggtacggcattttgctgatgcaggctactgagatcgaccggattagtctggttgagcagtagcgtcgccagcaattttttctgtgcgggggtaaaaccgggaagatccagattacgcaccagataagcagcgtgttgcggcgcttgtttgaagtcaacgctcaggccgatttcatgaagctgacaggcgctgatgagcaaatcgcggcttattgcttcaagatgccattcgttttccacctgatcgaagaagttagccgcaactttggctacgcgctgtgcctgatcaatatcgatcataaagcggcgttgaatattacgcagcgtacggctgcgaatatcctgctcgacggccagatgcaacatgccgtagaccaggccttcacgcagcgcaccgcccgccagggtcatacactgaatattcagttcggtaaaaatggcgatcaggatcgccagaccactcgggaacactaacgcacgttccagcgtcagcccgtcaatctccagttcctccagccgaccgcaatgaatggctcgctgtttcaattgctgcaacttttccagggtaatgcgttcatccatcccctgtgccatcatgatttcctgtaacgcctgcacggtgccggaagcaccaacgcacactttccagccgtgataccgtaattcatcggcaaccggacgtaacacttcgcgtgccgctttttctgcagcatcaaaattttcctgccccagattacgatcggcaaaatagcgttccagccaggtgacgcagcccatgctcaggctgaacaagctggtggtttgtgcacccgtgccggttaccagttcagtactggctccgcctatatccaccaccaggcgctgatcggcaccaccagtggtgtgagcaacgccctgataaatcagacgtgcttcctcttcaccgctgatcacctgtaccggacaaccgagaatttcctgcgctttggcaataaaatcacccgcattgacggcaaggcgtaacgtcgccgtagcgacaacgcgaatttggctgggaggaatatcttgcagacgttcagcaaacaggcgcaaacattgccaaccgcgctccattgcttcattggagagggcattttcgctattcaggccagcagccagacgcactttgcgttttattcgcgtcagcgtctggatgcttccagccacctcgcgcacaaccagcatatgaaaactattgctaccgagatcaatggctgcatacaggctgctggtggaacccatactcttcatccttcaatctgtctctgtgttggctgcattctttcacctgaatcacttactacagtaagctcatcgggattcattctcttgccatcttgatacagtttgaatgattttgagtatgacattttttatttaaccactacgacgacgattacgcggagcgccagtacgacgcggaccattgcctgtgcgcgggcgcgtgaggcgcagcggttttggcagatcggtcatcaatgcgtccggattgtatttgcttaccggaatactgtgaccaatataggtctcaatagcaggcaaattcaatgcatactcttcacacgccaggctgatagagtgaccgcttgcgcctgcgcgacctgtacgaccaatacggtgaacgtaatcttcacagtcatcgggtaaatcgtagttaaagacgtgcgtcactgccggaatatgcaaaccacgcgcggcaacgtcggtggcaaccagaatatccagatcgccacgggtaaattcatcaagaatacgcagacgttttttctgcgcgacatcgcctgtcaataaaccgacacgatgaccatctgctgccaggtggccccagatctcttcacaacggtgtttggtgttggcgaaaataatcgctctgtctggccactcttcttcgatcagcgtttgcagcaaacgcattttttcttcgttagaagggtagaaaagctcttctttaatacggtggcccgttttctgttccggttccacttcaatatattcggcattgttcatctgctcgaacgccagttcacgtacccggtagctaagcgtggcggagaacagcatgttgaggcgctggtttgcaggcggcatacggcggaacagccagcggatatctttaataaagcccagatcgtacatgcgatcggcttcgtccagtaccaccacctgaatggcaccgaggttaatgtggttctgcttggcgtagtcaattaaacgccccgtggtgccaatcagaatgtcaacgccgctttccagcactttcagctgtttgtcgtagccatcaccaccgtaagccagacccagcttcaggccagtagcttccgccagcggttctgcgtcggcatggatctgcacggcaagttcacgcgtcggtgccataattaaggcacgcggctgattcaccttgcgatcggcaatcgcaggatgagagagaagataatgaaacgtactcgtaagaaacgccatcgttttcccggtaccggtttgcgcctgcccggctacgtcacgacccgccagcgtcagcggaagggccagtgcctgaatgggcgtacagttatgaaacccttttttttcaagggcttctacaaccttcggatgcagggcgaagtcggaaaacttctgttctgttaaatgtgttttgctcatagtgtggtagaatatcagcttactattgctttacgaaagcgtatccggtgaaataaagtcaacctttagttggttaatgttacaccaacaacgaaaccaacacgccaggcttattcctgtggagttatatatgagcgataaaattattcacctgactgacgacagttttgacacggatgtactcaaagcggacggggcgatcctcgtcgatttctgggcagagtggtgcggtccgtgcaaaatgatcgccccgattctggatgaaatcgctgacgaatatcagggcaaactgaccgttgcaaaactgaacatcgatcaaaaccctggcactgcgccgaaatatggcatccgtggtatcccgactctgctgctgttcaaaaacggtgaagtggcggcaaccaaagtgggtgcactgtctaaaggtcagttgaaagagttcctcgacgctaacctggcgtaagggaatttcatgttcgggtgccccgtcgctaaaaactggacgcccggcgtgagtcatgctaacttagtgttgacttcgtattaaacataccttattaagtttgaatcttgtaatttccaacgcttcccgttttatcttaaatgcgaagtgaacagatttctggcagcagtctcaatccgtcttgtcgtttcagttctgcgtactctcctgtgaccaggcagcgaaaagacatgagtcgatgaccgtaaacaggcatggatgatcctgccataccattcacaacattaagttcgagatttaccccaagtttaagaactcacaccactatgaatcttaccgaattaaagaatacgccggtttctgagctgatcactctcggcgaaaatatggggctggaaaacctggctcgtatgcgtaagcaggacattatttttgccatcctgaagcagcacgcaaagagtggcgaagatatctttggtgatggcgtactggagatattgcaggatggatttggtttcctccgttccgcagacagctcctacctcgccggtcctgatgacatctacgtttcccctagccaaatccgccgtttcaacctccgcactggtgataccatctctggtaagattcgcccgccgaaagaaggtgaacgctattttgcgctgctgaaagttaacgaagttaacttcgacaaacctgaaaacgcccgcaacaaaatcctctttgagaacttaaccccgctgcacgcaaactctcgtctgcgtatggaacgtggtaacggttctactgaagatttaactgctcgcgtactggatctggcaagtcctatcggtcgtggtcagcgtggtctgattgtggcaccgccgaaagccggtaaaaccatgctgctgcagaacattgctcagagcattgcttacaaccacccggattgtgtgctgatggttctgctgatcgacgaacgtccggaagaagtaaccgagatgcagcgtctggtaaaaggtgaagttgttgcttctacctttgacgaacccgcatctcgccacgttcaggttgcggaaatggtgatcgagaaggccaaacgcctggttgagcacaagaaagacgttatcattctgctcgactccatcactcgtctggcgcgcgcttacaacaccgttgttccggcgagtggtaaagtgttgaccggtggtgtggatgccaacgccctgcatcgtccgaaacgcttctttggtgcggcgcgtaacgtggaagagggcggcagcctgaccattatcgcgacggcgcttatcgataccggttctaaaatggacgaagttatctacgaagagtttaaaggtacaggcaacatggaactgcacctctctcgtaagatcgctgaaaaacgcgtcttcccggctatcgactacaaccgttctggtacccgtaaagaagagctgctcacgactcaggaagaactgcagaaaatgtggatcctgcgcaaaatcattcacccgatgggcgaaatcgatgcaatggaattcctcattaataaactggcaatgaccaagaccaatgacgatttcttcgaaatgatgaaacgcagttaaatttgtcttatgccaaaaacgccacgtgtttacgtggcgttttgcttttatatctgtaatcttaatgccgcgctggcgatgttaggaaaattcctggaatttgctggcatgttatgcaatttgcatatcaaatggttaatttttgcacaggactggtgggtttggaacggactttcccttctgaataaaggtcttcgtggttatacttctgctaataattttctctgagagcatgcattgtgaatttactgacagtgagtactgatctcatcagtatttttttattcacgacactgtttctgttttttgcccgtaaggtggcaaaaaaagtcggtttagtggataaaccaaacttccgcaaacgtcaccagggattgatacctctcgttggggggattagcgtttacgcagggatttgcttcacgttcggaattgtcgattactatattccgcatgcatctctctatctcgcttgtgccggtgtgcttgttttcattggcgcgctggatgaccgttttgatatcagcgtaaaaatccgtgccaccatacaggccgctgttggcattgttatgatggtgttcggcaagctttatctcagtagcctgggttatatctttggctcctgggagatggtgctcggaccgtttggttacttcctgacgctatttgccgtctgggcggccattaatgcgttcaacatggttgatggcattgatggcttgctgggcgggttgtcctgcgtcagctttgcagcaatcggtatgattttgtggttcgacgggcaaaccagcctcgcaatctggtgctttgcgatgatcgccgccatcctgccatacatcatgcttaaccttggtatcctgggtcgccgctacaaagtctttatgggtgatgcgggcagtacgctgattggttttaccgttatctggatcctgctcgaaacgacccagggcaaaacccatcccatcagcccggttaccgctttgtggataatcgccattccgctaatggatatggtggcgattatgtaccgtcgcctgcgtaaaggcatgagcccattctctcctgaccgtcagcatattcaccatttgatcatgcgtgccgggtttacttcccgtcaggcgtttgtgctgattacccttgccgcagcactgctcgcttccattggcgtgctggcagaatattctcattttgtcccggagtgggtcatgctggtgctctttttgctagcattcttcctctatggatattgcattaagcgtgcctggaaagttgctcgctttattaagcgcgtaaaacgcagactgcgtagaaatcgtggtggcagccccaatttaaccaaataaatgaggatgtgatgacacaaccaatgcctgggaaaccggccgaagacgctgaaaatgaactggatattcgtgggttgtttcgtaccttgtgggctgggaagctatggattattggcatggggctggcgtttgcgttaatcgcgctggcgtatacgttttttgctcgtcaggagtggagcagcacggcgattaccgatcgtccaacggtgaatatgctggggggatattacagccagcagcaatttttgcgtaacctggatgtccgtagtaacatggcttctgccgaccaaccaagcgtcatggacgaagcctataaagagtttgttatgcaactggccagctgggatacccgcagagagttctggctgcaaaccgactattacaaacagcggatggtgggcaacagcaaagccgatgcggcgttgctggatgaaatgattaacaacatccagtttatccccggagactttacccgcgcggtcaatgacagcgtgaagcttattgccgaaaccgcgcctgacgctaataacctgttacgtcagtatgttgcttttgccagccagcgtgcagccagccatctgaatgatgagctgaaaggcgcatgggcggcgcgtaccatccagatgaaagctcaggtgaagcgtcaggaagaggtggcgaaagccatctacgaccgccggatgaacagcattgagcaggcgctgaaaattgctgagcagcataatattagccgcagtgcgacagatgtacctgccgaggaattacctgatagtgaaatgttcctgcttgggcgtccaatgcttcaggctcgactggaaaatttacaggccgtcggtccggcctttgatctcgactatgatcagaatcgggccatgttaaacaccctgaatgttggtccaaccctggatccgcgttttcagacctatcgctatttgcgtacgccggaagaaccggtaaaacgcgatagcccacgtcgtgccttcctgatgattatgtggggcattgtcggggggctgatcggggctggtgtcgcattaacccgccgttgcagcaaataacaacactgctgcggtgagcgcaaaggcgctcgccgcttattcgaagagaatcgatgtgaaagtactgactgtatttggtacgcgcccggaagccatcaagatggcgccgttggtgcatgcgttggcaaaagatcctttttttgaggctaaagtttgcgtcactgcgcagcatcgggagatgctcgatcaggtgctgaaactcttttccattgtacctgactacgatctcaacataatgcagccaggacagggcctgacagagataacctgtcggattctggaagggctaaaacctattcttgccgagttcaaaccagacgtcgtgctggttcacggcgatacgacgacgacgctggcaaccagcctggcggcgttttatcagcgtattcctgttggtcacgttgaggctggtctgcgcacgggcgatctctatagcccgtggccggaagaggctaaccgtacattgaccgggcatctggcgatgtatcacttctctccaaccgaaacttcccggcaaaacttgctgcgtgaaaacgttgcggatagccgaatcttcattaccggtaatacagtcattgatgcactgttatgggtgcgtgaccaggtgatgagcagcgacaagctgcgtagtgaactggcggcaaattacccgtttatcgaccccgataaaaagatgattctggtgaccggtcacaggcgtgagagtttcggtcgtggctttgaagaaatctgccacgcgctggcagacatcgccaccacgcaccaggacatccagattgtctatccggtgcatctcaacccgaacgtcagagaaccggtcaatcgcattctggggcatgtgaaaaatgtcattctgatcgatccccaggagtatttaccgtttgtctggctgatgaaccacgcctggctgattttgaccgacagtggcggcattcaggaagaagcgcctagcctggggaaacctgtgctggtgatgcgcgataccactgagcgtccggaagcggtgacggcgggtacggtgcgtctggtaggcacggataagcagcgaattgtcgaggaagtgacgcgtcttttaaaagacgaaaacgaatatcaagctatgagccgcgcccataacccgtatggtgatggtcaggcatgctctcgcattctggaagcgttaaaaaataatcggataagtctatgagttttgcgaccatttctgttatcggactgggttatatcgggctgccaacggcagcagcgtttgccagtcggcaaaaacaggtaattggtgtcgatatcaaccaacatgcggttgataccatcaatcgtggcgaaatccatatcgtcgaacctgatttggcgagtgtagtaaaaactgccgtagaaggcggttttttacgagcgagcacgacgccagttgaagcggatgcctggctgattgctgtacccacgccgtttaagggcgatcatgagccagatatgacctacgttgaaagcgctgctcgctccattgcgccagtgctgaaaaaaggcgcgctggtgatccttgaatccaccagcccggtggggagtaccgagaagatggcagaatggttagcagagatgcgtccggatctcactttcccgcagcaggtgggcgagcaggcggacgtcaacattgcttactgcccggaacgcgtgttaccaggacaggtaatggtcgagctgattaaaaacgatcgcgtgattggtggtatgacgccggtttgtagcgcccgcgccagcgaactgtacaaaattttcctcgaaggtgagtgtgtcgtcactaacagccggacggcggaaatgtgtaagctcaccgaaaacagcttccgcgatgtgaatatcgcttttgctaatgaattgagcctgatttgtgccgatcaggggattaacgtctgggaactgattcgcctggcgaatcgtcaccctcgcgttaatattcttcagcctggccctggcgtgggcggtcactgcattgctgttgatccgtggtttatcgtggcacagaacccccagcaggcgcggcttatccgtaccgcgcgcgaagtgaacgatcacaaaccgttctgggttatcgatcaggtgaaagcggcggtggctgattgcctggcggctaccgataaacgcgccagtgaactgaaaatcgcctgctttggtctggcgtttaaaccgaatattgatgacctgcgcgaaagcccggcgatggaaatcgctgaactgatcgcccagtggcatagcggcgaaactctggttgttgagcctaacatccaccagttgccgaaaaaactgaccgggctttgtactctggcgcagcttgacgaggcgctggcaacggcagacgtgctggtgatgctggtcgatcatagtcagttcaaagttatcaatggcgacaatgtccatcagcagtatgtcgtcgatgccaaaggagtctggcgctgatgagaaaaattctgataacaggtggtgccgggtttattggcagcgcgctggtgcgttatatcatcaacgaaacgagcgacgcggtggtagtggtcgataagctgacctacgccggaaacctgatgagcctggcaccggtcgcgcaaagcgagcgctttgcctttgagaaagttgatatctgcgatcgggcagaactggcacgcgtattcactgagcatcagccagactgtgtcatgcatctggcagccgaaagccatgttgaccgttctattgacggcccggcagcgtttattgaaaccaacattgtcgggacttatacattgcttgaagcggcgcgggcttactggaatgcgctgacggaagataaaaaaagtgcgttccgttttcatcatatctccactgacgaagtatatggtgacctgcacagcacggatgatttcttcaccgaaaccacgccgtatgcgccgagcagcccttattccgcgagtaaagccagcagcgaccatctggtgcgcgcctggctgcggacctatggtctgccgacgcttatcaccaactgcagcaataactacggcccttaccactttccggaaaaactgatcccgctgatgatcctcaacgcgctggcgggtaaaagcctgccggtatatggcaacgggcagcaaatccgtgactggctgtatgtggaagatcacgcccgcgcgctgtattgcgtggcgaccaccgggaaagtcggtgaaacctataatattggtggtcacaacgagcgtaagaatctcgatgttgtggaaaccatttgcgagctgctggaagaactggctccgaacaagccgcacggcgtggcgcactatcgtgacctgatcacctttgtcgctgaccgtccggggcatgatctgcgttatgccattgatgctagcaaaattgcccgtgaacttggctggctgccgcaggaaacctttgaaagtggaatgcgtaaaacggttcagtggtatctggctaatgaaagctggtggaagcaggtgcaggacggcagctatcagggcgagcgtttaggtctgaaaggctaattttcagcggaggcaaacatgaaaggtattatcctggcgggcggttccggcacccgattgcatccgattacgcgcggcgtaagcaagcaactgttgccgatttacgataagccaatgatttactatccgctgagcgtgctgatgctggccggtatccgcgaaattctcatcatcactacgccggaagataaaggttatttccagcgcctgctgggcgatggtagtgagttcggtatccagctggaatatgccgaacagcccagcccggacggtctggcgcaggcctttatcatcggtgaaaccttccttaatggtgaaccttcttgtctggtgctgggcgataacatcttcttcggtcagggcttcagtccgaagctgcgtcatgttgcggcgcgcaccgaaggggcgacggtttttggctatcaggtgatggacccggaacgctttggcgtggtggagtttgacgacaatttccgcgctatcagcctggaagaaaagccaaaacagccgaagagtaactgggcggtgaccgggctttatttctacgacagtaaagtcgtggagtacgcaaagcaggtgaagccgagcgagcgtggtgaactggagattacctccatcaaccagatgtacctcgaggcgggcaacctgaccgttgaactgctcgggcgcggatttgcctggctggataccggcactcacgacagcctgattgaagccagcacctttgtacagacggtggaaaaacgccagggctttaagattgcctgcctggaagagattgcctggcgtaacggctggctcgatgacgagggtgtgaagcgtgctgccagtagtttagcgaaaactggctacggccaatatctgctggagttacttcgtgcccgtccgcgccagtattgagccactaacctgggaaaacgccttctttggtgttaacagcgccatcgtgcgcattacgtctgaagcaccgctcctgacgccagacgcgttagcgccgtggtcacgggtgcaggccaaaattgcggcaagtaatacgggtgaactggatgccctgcaacagctgggattctccctggtagaaggtgaagttgatttggcgctacccgtgaacaatgccagtgatagcggtgctgtagtggcacaagagaccgatattcccgcattacgtcagttagccagcgccgcatttgcgcaaagccgttttcgtgcgccgtggtatgcgcctgacgccagcagtcgcttttatgcacagtggattgaaaatgccgtgcgcggcacctttgatcatcaatgtctgattttacgtgcggcgtccggcgatattcgcggctatgtctctttacgggaactcaatgcgacagatgcgcgaattggcctgctggctggacgcggtgcaggtgctgagctgatgcaaacggcgctaaactgggcgtatgctcgcggtaaaacaactttgcgggtggcgacccaaatgggcaacaccgccgcgcttaaacgatacatacaaagtggtgcgaatgtagaaagcaccgcgtactggttatacaggtgatcacatgattccatttaacgcaccgccggtggtgggaaccgaactcgactatatgcagagcgcaatgggtagcggcaaactgtgtggcgatggcggttttacccgtcgctgccagcagtggctggagcaacgttttggcagcgccaaagtgttactgacgccgtcctgcaccgctagcctggagatggcggcgctgctgctcgatatccagcctggcgatgaagtgatcatgccgagctacacctttgtctccaccgccaatgcctttgtgctgcgtggcgcaaaaatcgtttttgtggatgttcgcccggacaccatgaacatcgacgaaacgctgattgaagcggcgatcaccgacaaaacgcgcgttatcgtgccggtccattacgcgggtgtggcctgcgaaatggacaccattatggcgttggcgaaaaagcataatttgtttgtggtagaagatgccgctcagggcgtgatgtccacttacaaagggcgtgcactgggaaccattggtcatattggctgctttagcttccatgaaaccaaaaactacacggcgggcggtgaaggcggcgcgacgctgattaacgataaagcgttaatcgaacgagccgagatcatccgtgaaaagggcactaaccgcagccagttcttccgtggtcaggtcgataaatatacctggcgcgatattggctccagctatttgatgtccgatctgcaagctgcatacctgtgggcgcaactggaagcagcggatcgtatcaaccagcaacgtctggcgctgtggcaaaactactacgatgcgttagcgcctctggcgaaagccgggcgtatcgagctgccgagcattcccgatggctgcgtgcagaacgcgcatatgttctacattaaactgcgggatattgatgaccggagcgcgttgattaactttctgaaagaagcggaaatcatggcggtgtttcattacattccgctgcacggttgccctgcgggggaacactttggtgagttccacggtgaagatcgctacaccaccaaagagagcgagcgcctgctgcgcctgccgctgttctacaacctgagccccgtcaatcagcgtacggtaattgcgactttgttgaactacttttcctgatatgagcttggcaaaagcgtccttgtggacggcggccagtacactggtcaagattggtgccgggttactggtcggtaagttgctggcggtgagttttggtccggcggggcttgggctggcggcaaatttccgccagttgattaccgtgctcggcgtgcttgccggggctggcatctttaacggtgtaaccaaatacgttgcccagtaccatgataatccgcaacagctgcgccgcgtggtcggcactagtagtgcgatggtacttggtttctctacgctgatggcgctggtttttgtgctggcagctgcgccaatcagccagggattgtttggtaataccgactatcaggggctggtgcgtttagtggcgctggtgcaaatggggatcgcctggggcaacctgttactggcgctgatgaaaggctttcgcgatgccgcaggtaatgcgttaagcctgattgtcggcagcttgattggcgttctcgcgtactacgtcagttaccgtttgggcggttatgaaggggcgttgctgggtctggcgctgattcccgcgctggtggtaattcctgccgccatcatgttgatcaaacgtggtgtcatcccgttaagctatctgaaacccagctgggataacggtctggcagggcagttgagcaaatttacgctcatggcgttgattacgagcgtgaccttgcctgttgcttacatcatgatgcgtaaactgctggcggcgcagtatagctgggatgaggtggggatctggcaaggggtgagcagtatttccgatgcctacctgcaatttattacggcaagcttcagcgtatatttgctgcccacgttgagccggctaacggaaaagcgcgatatcacccgggaagtggttaaaagcctgaaattcgtcttaccggcagtggcggcggcgagttttaccgtctggctgctgcgtgattttgctatctggctgctgttgagcaataaatttaccgctatgcgcgatctctttgcctggcagttagtgggtgatgtgttaaaagtgggcgcttatgtctttggttatctggtgatcgccaaagcgagtctgcggttttatattctggcggaagtcagccagttcactttattgatggtatttgcccactggctaatccctgcgcatggtgcactgggcgcggcgcaggcatatatggcaacttatatcgtctatttttctctttgttgtggcgtgtttttactctggcgtaggcgggcatgactgtactgattcacgtactgggaagcgatatccctcaccataaccgaaccgttttgcggtttttcaatgacgcgctggccgcgacgagcgagcacgcgcgcgagtttatggttgttggcaaggacgacggcttaagtgatagctgtccggcgctttctgtgcaatttttccctgggaaaaaaagcctggcggaagcggtcatcgcgaaagcaaaagctaaccgtcagcagcgttttttcttccacggtcagttcaatcccacactgtggctggctctgctgagtggtggcattaagcccagccagtttttctggcatatctggggggcagacctgtatgagctttccagtggcttgagatataagcttttttacccactacgtcgcctggcgcaaaagcgagtcggctgtgtatttgccacccgcggcgatttgagcttttttgccaaaacgcacccaaaggtgcggggcgaactgctgttcttcccgacgcggatggaccctagcctcaatacgatggcgaacgatcggcaacgtgaagggaaaatgaccattctggtggggaactccggcgaccgcagcaatgagcatattgctgccttgcgcgccgttcatcagcaatttggcgatacggtaaaagtggtggtgccgatgggatatccgcctaataacgaagcgtacattgaggaagttcgtcaggcggggctggagttattcagcgaagaaaatctacaaattctgagcgaaaaactggaatttgacgcctatctggcgctacttcgtcagtgcgatcttggttactttatttttgcccgccagcagggcattggtacgctgtgcttactgattcaggcgggcattccttgtgtgcttaaccgggaaaatccgttctggcaggatatgacggaacaacatttgccggtgctgtttactaccgacgatctcaacgaggatattgtgcgtgaagcgcagcgccagttggcgagcgtggataaaaacaccattgccttctttagccctaactatctacaaggctggcagcgggcgttggcgattgccgccagggaggtcgcatgagtctgctgcaattcagtggcctgtttgttgtctggctgctctgcacgctgtttattgccacgctgacctggtttgagtttcgccgtgtgcgctttaacttcaatgtcttctttagtttgctgtttttgctcacctttttcttcggcttcccgctgaccagcgtgctggtatttcgctttgatgttggtgtcgcgccgccagaaatcttgttgcaggcgttgctttctgcgggctgcttctacgcggtttactatgtcacctacaaaacccgcctacgcaaacgcgttgctgatgtaccgcgccgtccgctgtttaccatgaaccgcgtggagaccaatcttacgtgggtgatcctgatgggtatcgcgctggtaagcgtcggcatcttcttcatgcacaacggctttttgctgttccggcttaactcctacagtcagatcttttccagtgaagtctccggcgtggcgttaaaacgcttcttttactttttcatcccggcgatgctggtggtctactttctgcgccaggacagcaaagcgtggctgtttttcctcgtcagcacggtcgcctttggcttgctgacttatatgattgtcggcggcactcgcgccaatatcatcatcgcattcgctatcttcctgtttattggcattattcgcggctggattagcttgtggatgctggcggcggcgggcgtgctggggattgttggcatgttctggctggcactaaaacgctatggaatgaatgtgagcggcgatgaagcgttctatacgtttctctatctcactcgcgacaccttcagcccgtgggagaatctggcgttgctgttgcagaactacgacaacatcgacttccagggcctggctccaattgtccgcgatttctatgtctttatcccttcctggctgtggccgggtcgcccgagtatggtgctgaacagtgccaactactttacctgggaagtgctgaataaccactccggactggcgatcagccctacgcttataggcagtctggtggtgatgggcggcgcgttgttcatcccgctcggggcgatcgtggttggtctgatcatcaaatggttcgactggctgtatgagctgggcaaccgcgagcctaatcgctataaagctgcgatattgcacagtttctgctttggggcgatcttcaatatgatcgtgctggcgcgtgaagggctggatagctttgtcagtcgcgtggtcttttttatcgtggtcttcggcgcatgtctgatgatcgcaaaactgttgtactggctttttgaaagcgccggactcattcataaacgtacaaaaagtagcctccggacgcaggttgaaggataacaatgaataacaacaccacggcaccaacctatacgctgcgtggcttacagttgattggttggcgtgatatgcagcacgccctcgattatctgtttgctgacgggcagcttaagcagggaacgctggttgccattaatgctgaaaaaatgctgactattgaagataacgccgaggtcagggagttaattaacgctgccgaatttaaatatgcggatggcatcagcgttgtacgtagtgtacgtaaaaagtacccgcaggcgcaggtttcccgcgttgccggtgccgatctctgggaagagctgatggcgcgcgcaggcaaagaagggacgccggtatttcttgtgggcggtaaacctgaagtgctggcgcaaactgaagctaaactgcgcaaccagtggaatgtgaatatcgttggcagtcaggatggttattttaaacccgagcagcgtcaggcgctgtttgaacgcattcatgccagcggtgcgcaaatcgtcaccgttgcgatgggaagcccaaagcaggagatcatcatgcgcgactgccgtctggtacatccagatgcgctgtatatgggcgttggcgggacttacgatgttttcaccggtcacgtaaaacgcgcaccgaaaatctggcaaacgctggggctggagtggctctaccgcctgcttagccagccgagccgcattaagcgtcagcttcgtttgctgcgttatttacgctggcactacaccggcaacctatgattttcctctctttgtaaagcgacggagtggtcactccgtcgcctgtctgcttttttattacacaaagcattcaaatttttaatgctttatttgccatttctcctgaattacgaaaacatttgcaacactcgatgtacccataacgataaccggtaacaccggaaagcatgcaaacacaacacgaggatttatggcagataacaaaccagagctacagcgtgggctggaagctcgacatatcgaactcatcgccctggggggcaccattggcgtcggcctgtttatgggggccgccagtaccctgaaatgggccgggccatccgtattgttggcctatatcatcgccgggctgttcgtctttttcatcatgcgtagtatgggcgaaatgttgttcctcgaaccggttaccggtagcttcgccgtttatgcgcatcgttatatgagcccgttctttggctatctcaccgcctggtcttactggtttatgtggatggcggtggggatctctgaaatcaccgccattggcgtttatgtccagttctggttcccggagatggcgcagtggatacccgcattgatcgcagtggcgctggtggcgttggcgaatctggcggcggtgcggttgtacggcgaaatcgagttctggttcgcgatgatcaaagtcaccacgattatcgtgatgattgtcattggcctgggcgtgattttctttggctttggcaatggcgggcagagcattggttttagcaatctcacagagcatggcggtttctttgcgggtggctggaaagggttcctgaccgctctgtgtattgtggtggcgtcctaccagggcgtggagctgattggcattactgccggtgaagcgaagaatccgcaggtgacgctgcgcagtgccgtaggcaaggtgctgtggcggatcctgattttctacgtaggcgcgattttcgttatcgtcaccatcttcccgtggaatgaaataggcagcaacggcagcccgttcgtactgacttttgccaaaatcggtattaccgcagcggcgggcattatcaactttgtggtgctgacggctgcgctctctggctgtaacagcggcatgtacagttgcggacgtatgctctacgcactggcgaaaaaccgtcagttaccggcggcaatggcgaaagtttcccgtcacggcgtaccggttgcgggtgtggcagtatctattgctattctgctaattggcagttgcctgaactacatcattcccaatccgcagcgtgtgtttgtctacgtctacagtgccagcgtgcttccggggatggtgccatggtttgtgatattgataagccagctgcgttttcggcgtgcacataaagcggcgattgccagccatccgttccgcagtatcctgttcccgtgggccaattacgtaacaatggcattcctgatttgcgttttgatcggcatgtactttaatgaagatacgcgtatgagcctgtttgttggcatcatctttatgctggcggtgacggcgatttataaagtttttggccttaatcgccacgggaaagcgcataaactggaggaataagcagcaaaacgcacaaaccgtaaccaaacgcgcaatttatttaaaaagggactagacagaggggtgggaagtccgtattatccacccccgcaacggcgctaagcgcccgtagctcagctggatagagcgctgccctccggaggcagaggtctcaggttcgaatcctgtcgggcgcgccatttagtcccggcgcttgagctgcggtggtagtaataccgcgtaacaagatttgtagtggtggctatagctcagttggtagagccctggattgtgattccagttgtcgtgggttcgaatcccattagccaccccattattagaagttgtgacaatgcgaaggtggcggaattggtagacgcgctagcttcaggtgttagtgtccttacggacgtgggggttcaagtcccccccctcgcaccacgactttaaagaattgaactaaaaattcaaaaagcagtatttcggcgagtagcgcagcttggtagcgcaactggtttgggaccagtgggtcggaggttcgaatcctctctcgccgaccaattttgaaccccgcttcggcggggttttttgttttctgtgcatttcgtcaccctcccttcgcaataaacgcccgtaataactcattgccccacggtatgatttcgcccttaacgtattgaaggatgacttcaggcaaggagcgaccatgctgcaacaggttccaacgcgtgcttttcatgtgatggcgaaaccgagcggttccgattgtaatctgaactgtgactactgtttttatctcgaaaaacaatccctttaccgcgaaaagccagtcacgcatatggacgatgacacgctggaagcgtatgtccgtcactatatcgctgccagcgaaccgcaaaacgaagtggcttttacctggcagggcggcgaaccaacgctactcgggctggcgttttaccgccgtgccgtagcgctacaggcgaaatatggtgctggcaggaagataagtaacagcttccagactaacggcgtgctgctggatgacgaatggtgcgcgtttctcgcggagcatcattttcttgttggtttaagcctggatggcccgcctgagatccacaatcaatatcgcgtgactaaaggtggcagacccacgcataagctggtgatgcgtgccctgacgctcctgcaaaaacatcatgtcgactataacgtgctggtctgcgttaatcgcaccagcgcgcagcaaccgttgcaggtatatgattttttgtgcgatgcgggagtcgaattcatccagtttattccggtggtcgagcgcctggctgatgaaacaactgcccgcgatggacttaagttacatgcgcctggtgatattcagggtgagctaacggaatggagcgtgcgccccgaggagttcggtgagtttctggtggcgatattcgaccactggatcaaacgcgacgtcggcaagattttcgtgatgaatatcgaatgggcgtttgccaattttgtcggtgcgccgggtgcggtttgccatcatcagccaacctgtgggcgcagcgtgattgttgagcacaacggcgacgtttacgcctgtgatcactatgtttatccgcaatatcggctggggaatatgcaccagcaaacaattgcagaaatgatcgattccccgcaacagcaggcgtttggtgaagataaatttaagcagttaccggcgcagtgtcgcagttgtaacgtgttaaaagcgtgctggggaggctgcccgaaacaccgcttcatgctcgatgccagcggcaaaccgggactgaattatttgtgtgccgggtatcagcgttatttccgccatctaccgccatatcttaaagcaatggctgatttgctggcgcacggtcgcccggccagcgacattatgcatgcgcatttgctggtggtgagtaagtaaaaatcggcggccgcctgcggttgattgccggatgcggcgtaaacgccttatccggcctacatgatcgtgcaaattcaataaattgcagcgttctgtaggctggataagatgcgtcagcatcgcatccggcaaaggcagatctcagcgatagcgccggcttagtcagatttaatctgcgcgcgtggtggatattttttcaggatctccatatacgcgtgcatttcggtctgtagcggtacacccatcggaatatggcgcacgccgatggagtcgctttcctgcggatcggtgtagaggttaaacacgctgcttcccgccgtttgcattactgtgccggtgaatccaccctgatatccgctctgggtataagcgtaaggttgctgaatcaggacgtgatacttgaactcatccatacgcacagcagcgagtttaccgttgaggaagtagtgctcggccttacggttagactgaccatttgttcccaggaagaaggatgtctggtccacaccatcgataaaggtggttttcggcactaaattcgccactttcgctccaggatgccctgccagatccagcgcggtagggaagagatctgccagatcgacaataccgtcagatttacgcggttggatcatccctttccagtaaacgaaagtcggtacgcgaacgccgccttcccaggtgctacctttcgcaccacggaacggggtgcgtccgtgcggcggtacttcggcttccggtccgttatcggaggtaaagacgatcagcgtgttatcaagctgaccgtttttctccagtgttttatacagattagcgaacacatcgttcatctccaccatgcagtcgccatagctggtgcgtgccggagagctacccgcatatttcgcatttgggtagttatcgaagtggcagccacgagtgccgtagtagaggaagaatggtttatcgctcttcgccatcttgtcgaggaacttaacgccatagtccatccagcgttgatccagatcttccatatatttcggcgtaatgtcggcaatggcctgttgttcgccgccgcgcaccgcatgaacgtcatctttgctgaacggtaattgcttgatgtattcagaacggtccggactcagggccacttccggattgacgtgaacgtcgcgccattcggtgtacatatcagacacgctgttaaagccacggaaatcatcaaagccaacgttctgcggctggctctctttgttttcccccatatgccattttccgatggcctgagtgacgtagccctgatcgtgcagcaactgcggcagcgtggttaacccttgcagcccgcccggttgcccgtacattggcggcatcagaatgccgtggtggatggagtattgtccggtgagaatggtggcgcgggttggggaagagcttggttgagaatacgcgctagttaaaatcagcccctggctggcaacggcgtcgatatctggtgtagggttacccaccgccacgccgccaccgttaaaaccgacgtccatccagcccacatcgtccagcaagaaaacaaccacattcggtttcttaccggtttttttctcaagttctgccagcttctgctgggtttctttatcctgcgccggatgctgcattactggcatcatattgtcggcaatagtggtcgccggtttaaccagatactggtttgggtgatcgtatccggcaaagcctttgcgtgcggtggcagtactcggggtatctgctgcgctggccatgagaggaagagcggcggcgacagcaacaacaagacgtttgggactaaagctaaattccatgcaaaatgctccggtttcatgtcatcaaaatgatgacgtaattaagcattgataattgagatccctctccctgacaggatgattacataaataatagtgacaaaaataaattatttatttatccagaaaatgaattggaaaatcaggagagcgttttcaatcctacctctggcgcagttgatatgtaaggcaggtttattatatcgcgttgattattgatgctgtttttagttttaacggcaattaatatatgtgttattaattgaatgaattttatcattcataataagtatgtgtaggatcaagctcaggttaaatattcactcaggaagttattactcaggaagcaaagaggattacagaattatctcataacaagtgttaagggatgttatttcccgattctctgtggcataataaacgagtagatgctcattccatctcttatgttcgccttagtgcctcataaactccggaatgacgcagagccgtttacggtgcttatcgtccactgacagatgtcgcttatgcctcatcagacaccatggacacaacgttgagtgaagcacccacttgttgtcatacagacctgttttaacgcctgctccgtaataagagcaggcgtttttttatgtatcaggaaggccccggaggtgcttgcctccgggtgagaaggaattactgtggcgggttattctgcaacgttaacatcaaaccgtcgcgacgcatagctgcagcttcttccggcttgtgcagtctgtccagcgcgtcggcaagccatgcgtaatcgtaggcgtccggacgttgtttcagcgctgcgcggaaggcgaggcttgcttcctgccattctccgtgcttcatcagactctggcccagtgtgctccacaacagcgggcgatcgccgacgtttttgatttgctggcgcagcactttttccagctgttccggattgtttgttttcagtcgaggaatcggcagcagtaggcgatcgtcgtactggcgtttcaggccatcgatgataatttgctgggcagtatcatgatcgtcacattcaataagatgttccgccattgccacctgcaacgctacctgatgacgcgttttccggctttggtttttccaccagttacgcaaaccttcgctaccgttatcggcacgcgcctgatccatcaggccaatccatgcctgttgttccagcattgcacgatgttcttcatcaccaacatgggctttcgccatacttgggataatatccagcaggctactccatgcacctgtgcggatatacgcctgttccgccagacgtaatacttccggatggcgtggcgtaacttccagcagcttatccacgccgtggcgtgcagcatggttttcattacgggccagttgcagacgtacgcgggtgatttctaccggaatggtgtcgttgccggccagctccgctgcgcgttccagatgttggttggcgcgtgcttcatcaccacgttgttgcgcggcttcggcagccagtagatagttcaccaccggttgttccgcgtgatcggcatttttcgccatcagcttttcaacttgctgataatcgccttccgccagtttcagcagcgcctgttcggtctgcttacgtgcacggcgacgcttacgtccgacaaaccacccacgggtgtgcgcgccagtgcggaagatccgccgcagtagccactcaatggcaaacagcactaccatcgccagaatcaatatgatcgccaggcccgtgacgctggtttcgatattgtagttgtcggtctggatcagcacataaccctgatggccggcaatcatcgggccaaccacgatccccgcaatcagcaacacaaagagcaataacacttttagcatggttattctccttgcggcgcggctgccggagtatcagcttgcggtgcaggtgcaggtttagcttccgttgtccccgctgccggttgtgccagcaggttacgcacgcgagtctgcatcagtttttccagcatcgcctggctttgcagggtttccggaagatccatgctgatattttgctggcttaactggtccacctcgtcgaggaacgctttggtggtggcatcatcagtatcgtagtaagcacgtacccaggtggagacgttctccagcgcctggcgataagtctcttcctggtgacgcggtacagcttgtgctgcgaccagcaggcgagagcgaatattttcgcgcagatagatatcctgatttggcgctaacagcggtacggcggtgtcatcacgacggcgaatcgtaatgaagttgtccataaagttctgccagcttttttgcagattgatacgccattcgctgatggaactggaaagctcttcaccgtcactatccatcgggctaccatcgctgtcattatcggccagacgcaggttatctacctgattactaagctgattaagcttaaggatgatgccgtcataatccacctggcttactgcagaaaggctggcgatatcatcggtaattgcccgacgaacggtaatcagactcgggtcattcatatccgccaggctggcgtctgcacttttcagcaacgctgcagcggtcgtgacgtcctgatcgctccacagcttccgtccggcgagtttcaccagaaaatcggcctgagccagcagccaggttttagcatcgctgccggaaatggtggcgaccttttgttggacttcatccaactgttttgccagcgtttcttgctgacgattcgcctgcttaagttgtgcagcttgttgcttaataatgccttccagctcggctttttggctctcctgggctttttgcaatgccgtcagttggttagccagggcatcgctggtggcggtctgattgacggcctgttgtttaccccagccatacaaaccgatgcccgccgccagagcaatagcgatagccaccgcgctgagaatcaatgcggtattgttcttactctttttttctgttgcgacaggttgactcgtggtgtccacggcctccctggtctcttcaaccacggcggaggttttttcttgttccgtcattatggcttcctgttatgagagttattgtaatgcccgtaaaagcgcatcgttgtcagcgttatcggcgaccttaatgtcttgccagcccagttcccgggcgagtttcgccaaacgctcactgacgaccaatagtcgacagtgtagtaaccagtgctcacgataccattgtgggatcaggctccagagttgctgcaacatttcaccgctggtaacaacgaccatcgtcacctcgcgggcttgccagcgcatcgcttcttctgcaccatcgtaatggattgcgcatcgttgataacattcacaaaaagtgacctcagcaccgcgcgccgtcagggtatccccaattagctcacgaccaccattgccacgtaatatcagcgcacgtttgcccgcaatattttgtaattcaggtaattgtagcaagacttcgctgatttcccgatcctgcgggtagagaatcttctgtccacttacggtatgtagtgccagtgcggtggtgcgtccaatggcgaaataatcaggtagtcggggccatttacgatcttgctgatgcagctgactttgggcaaaagcaaccgcgtgttggctgagggcaaacaacagatcgctctcccccagcgctgccagttgatcagcaagttgcggtaattgttgacccggagaaaactcaatcagcggaaaatgccaggccacctgccccagtgtgcgcagacggctcactaactcttctccagcgggagacgggcgggtgacaaggatactcatgccggggcgtctccgttatagacttcagcgaggatctcgcgcgcgccgttattcagtagctcttctgccaggctaatccccatttgttcggcatcttgcggcgcaccgcggcgttcaccgcgaataatctggctaccgtccggcgcgccgaccagcgcacgcagccagatttcgccatcaataagctcggcgtagctaccaattggcacctgacatccgccttcgagacgggtattcatggcgcgttctgcggtaacgcgcagtgcagtttcgtggtgattcagcgcggcaagcagctcgcgagtgcgactatcatcaaggcggcattcaatacccaccgcaccttgtcctaccgccggaagagaaatctcgggtggcaacgcggcgcgaatacgactctccagacctaaacgttttagtccggctacggcaagaatgatggcatcgtattcgccgttatccagtttgctcaggcgagtgccgacgttgccgcgcagggagcggataatcagatccggacggcgttcagccagttggcactggcgacgtaaactggacgtcccgacgatactgcctgccggtaacgcatccagactgtcatagttattggacacaaaggcatcgcgaggatcttcacgctcacaaatagtgaccagtcccagaccttgcgggaattcaaccggcacatctttcatactgtgtacggcgatatcggcgcgattttcgaggagcgcgacttccagctcttttacaaataagccttttccgcctactttcgccagcggcgtatcaagaatcacatcgccgcgcgtcaccatcggtaccagttcaacgaccaggcccggatggctcgccatcaacttgtctttgacatagtgtgcctgccagagtgcaagtgggctttggcgtgtggcaattcttaaaacattgtctaacatgcttgttaccgtcattatcatccgtggtccatcctaacatccttgccagagtgatgtcagtgttgtggtgaaacgtagacgcctgcgcaaaccgtaaaatgaggtctggcagtggatcctgacaggcgtttcacgccgttgtaataaggaatttacagagaataaacggtgctacacttgtatgtagcgcatctttctttacggtcaatcagcaaggtgttaaattgatcacgttttagaccattttttcgtcgtgaaactaaaaaaaccaggcgcgaaaagtggtaacggttacctttgacatacgaaatatcccgaatgccgcgtgttaccgttgatgttggcggaatcacagtcatgacgggtagcaaatcaggcgatacgtcttgtacctctatattgagactctgaaacagagactggatgccataaatcaattgcgtgtggatcgcgcgcttgctgctatggggcctgcattccaacaggtctacagtctactgccgacattgttgcactatcaccatccgctaatgccgggttaccttgatggtaacgttcccaaaggcatttgcctttacacgcctgatgaaactcaacgccactacctgaacgagcttgaactgtatcgtggaatgagtgtacaggatccgccgaaaggtgagcttccaattactggtgtatacaccatgggcagcaccagctccgtagggcaaagttgttcctctgacctggatatctgggtctgtcatcaatcctggctcgatagcgaagagcgccaattgctacaacgtaaatgtagcctgctggaaaactgggccgccagcctgggtgtggaagtcagcttcttcctgattgatgaaaaccgcttccgtcataatgaaagcggcagcctggggggcgaagattgtggctccacccagcatatactgctgcttgacgaattttatcgtaccgccgtgcgtctcgccggtaagcgtattctgtggaatatggtgccgtgcgacgaagaagagcattacgacgactatgtgatgacgctttacgcgcagggcgtgctgacgccaaatgaatggctggatctcggtggcttaagcagcctttctgctgaagagtactttggtgccagcctttggcagctctacaagagtatcgattccccatacaaagcggtactgaaaacactgctgctggaagcctattcctgggaatacccgaacccacgtctgctggcgaaagatatcaaacagcgtttgcacgacggcgagattgtaagctttggtctcgatccatactgcatgatgctggagcgtgttactgaatacctgacggcgattgaagattttacccgtctggatttagtacgtcgctgcttctatttaaaagtgtgcgaaaagctcagccgtgaacgcgcctgcgtaggctggcgtcgcgcagtgttgagccagttagtgagcgagtggggttgggacgaagctcgtctggcaatgctcgataaccgcgctaactggaagattgatcaggtgcgtgaggcgcacaacgagttgctcgacgcgatgatgcagagctaccgtaatctgatccgctttgcgcgtcgcaataaccttagcgtctccgccagtccgcaggatatcggcgtgctgacgcgtaagctgtatgccgcgtttgaagcattaccaggtaaagtgacgctggtaaacccgcagattagtcccgatctcagcgaaccgaatctgacctttatttatgtgccgccgggccgggctaaccgtagtggttggtatctgtataaccgcgcgccaaatattgagagcatcatcagccatcagccgctggaatataaccgttacctgaataaactggtggcgtgggcatggtttaacggcctgctgaccagccgcacccgtttgtatattaaaggtaacggcattgtcgatttgcctaagttgcaggagatggtcgccgacgtgagccaccatttcccgctgcgcttacctgcaccgacaccgaaggcgctctacagcccgtgtgagatccgccatctggcgattatcgttaacctggaatatgacccgacagcggcgttccgcaatcaggtggtgcatttcgatttccgtaagctggatgtcttcagctttggcgagaatcaaaattgcctggtaggtagcgttgacctgctgtaccgcaacagctggaacgaagtgcgtacgctgcacttcaacggcgagcaaagcatgatcgaagccctgaaaactattctcggcaaaatgcatcaggacgccgcaccgccagatagcgtggaagtcttctgttatagccagcatctgcgcggcttaattcgtactcgcgtgcagcaactggtttctgagtgtattgaattgcgtctttccagcacccgccaggaaaccgggcgtttcaaggcgctgcgcgtttctggtcaaacctgggggttgttcttcgaacgcctgaatgtaagcgtacagaaactggaaaacgccatcgagttttatggcgcgattagccataacaaactgcacggcctgagtgtgcaggttgaaaccaatcacgtcaaattaccggcggtggtggacggctttgccagcgaagggatcatccagttctttttcgaagaaacgcaagacgagaatggctttaatatctacattctcgacgaaagcaaccgggttgaggtatatcaccactgcgaaggcagcaaagaggagctggtacgtgacgtcagtcgcttctacagcagtagccatgaccgttttacctacggcagtagcttcatcaacttcaacctgccgcagttctatcagattgtgaaggttgatggtcgtgaacaggtgattccgttccgcacaaaatctatcggtaacatgccgcctgccaatcaggatcacgatacgccgctattacagcaatattttagctgatgaacgtgccggaaagcgaggcttatccggcatgcaatcttagcggaaactgactgtttcacccgcctgctgcgtcgccgcctgttccagcaaatcccagaaggtttcgccgctgcgatcacaaatccactcatcgcctttcaggtcaaaatggtagccgccctgtttggttgccagccatacctggtgcagcggctcctggcggttgataatgattttgctgccattctcaaaggtaatggtcagtacgccgccgttgatttcgcagtcgatatcgctgtcgccatcccagtcgtccaggcgttcttcaatggtcagccagagttgatcagccaggcgatgaaattcactgtcgttcattgttgtatcctgtttttaagtgatggcggcagtatagcggcatggggtcagggcttcaaagtttgcacctctgcggctgcgttccggcacgatagttccgtcaccggaataatgatgtctctgtgtagcgaaagatttgtctctagtttagggcgcagttacaccacgtctttccctgtttctggtaaacattatgatcaggtttaccgagcgagcatcctcacgctgacggaactaaaaaagacaacaaacaaaccacattgcgatagtgcataaagccatcctggcgcgaggtgccgatcacgaaactaccagcaaaacataaatccccacgagtaagcgttatactcgcagcatttcctcacttttcagacttcataaagagtcgctaaacgcttgcttttacgtcttctcctgcgatgatagaaagcagaaagcgatgaactttacaggcaatccataatgaaaaacgtgtttaaggcactcactgtattacttactctcttcagcctgacgggctgcggtctgaaaggtccgctctatttcccgcctgcagataaaaacgcaccgccgccgaccaaaccggtagagacgcaaacgcaatccacggtgccggataaaaacgatcgcgccactggcgatggtccatcccaggtgaattactaaaagtcagtttctgtacccgcgtgattggagtaaatgatgcagttcagcaaaatgcatggccttggcaacgattttatggtcgtcgacgcggtaacgcagaatgtcttttttagtccggagctgattcgtcgcctggctgatcggcacctgggggtagggtttgaccaactgctggtggttgagccgccgtatgatcctgaactggattttcactatcgcattttcaatgctgatggcagtgaagtggcgcagtgcggcaacggtgcgcgctgctttgcccgttttgtgcgtctgaaaggactgaccaataagcgtgatatccgcgtcagcaccgccaacgggcggatggttctgaccgtcaccgatgatgatctggtccgcgtaaatatgggcgaacccaacttcgaaccttccgccgtgccgtttcgcgctaacaaagcggaaaagacctatattatgcgcgccgccgagcagacaatcttatgcggcgtggtgagcatgggaaatccgcattgcgtgattcaggtcgatgatgtcgataccgcggcggtagaaacgcttggtcctgttctggaaagccacgagcgttttccggagcgcgccaatatcggttttatgcaagtggttaagcgcgagcatattcgtttacgcgtttatgagcgtggggcaggagaaacccaggcctgcggcagcggcgcgtgtgcggcggttgcagtagggattcagcaaggtttgctggccgaagaagtacgcgtggaactccccggcggtcgtcttgatatcgcctggaaaggtccgggtcacccgttatatatgactggcccggcggtacatgtctacgacggatttattcatctatgaagcaaccaggggaagaactgcaggaaacactcacggagcttgatgaccgggcggttgtcgattatctgattaaaaatcctgagttttttatccgtaatgcgcgcgcagtagaagcgatacgtgtgccgcatccggtacgcggcaccgttagcttggtcgagtggcacatggcccgcgcacgtaatcatattcatgttctggaagagaacatggcgctgttgatggaacaggctatcgccaacgaaggcctgttttatcgcctactctacctgcagcgcagtctcaccgccgccagcagtctcgacgatatgctgatgcgctttcaccgctgggcgcgcgatctcggcctggcaggtgcgagtctgcgcctgtttccggatcgctggcgcttaggtgcgccgagcaaccacactcatctggcattaagccgtcagtctttcgaaccgctgcgtattcagcgtttggggcaggaacagcactatcttgggccgcttaacggaccagagctgctggtggtgctaccggaagcgaaagcggtgggaagcgtggcgatgagcatgctgggaagcgatgctgatttgggtgtcgtgctgtttaccagtcgcgatgccagtcactatcaacaagggcaaggaacgcagttacttcatgaaattgcgctgatgttgccggagcttctggagcgttggattgaacgcgtatgaccgatttacacaccgatgtagaacgctacctacgttatctgagcgtggagcgccagcttagcccgataaccctgcttaactaccagcgtcagcttgaggcgatcatcaattttgccagcgaaaacggcctgcaaagctggcagcaatgtgatgtgacgatggtgcgcaattttgctgtacgcagtcgccgtaaagggctgggagcagcaagtctggcgttacggctttctgcgctacgtagcttttttgactggctggtcagccagaacgaactcaaagctaacccggcgaaaggtgttagcgcaccgaaagcgccgcgtcatctgccgaaaaacatcgacgtcgacgatatgaatcggctgctggatattgatatcaatgatcccctcgctgtacgcgaccgtgcaatgctggaagtgatgtacggcgcgggtctgcgtctttctgagctggtggggctggatattaaacacctcgacctggagtctggtgaagtgtgggttatggggaaaggcagcaaagagcgccgcctgccgattggtcgcaacgctgtggcgtggattgagcactggcttgatttgcgcgacctgtttggtagcgaagacgacgcgctttttctgagcaaactgggcaagcgtatctccgcgcgtaatgtgcagaaacgctttgccgaatggggcataaaacaagggctgaataatcacgttcatccgcataaattacgtcacagcttcgccacgcatatgctggagagcagcggcgatcttcgtggtgtgcaggagctgctgggtcatgccaacctctccaccacgcaaatctatactcatcttgattttcaacaccttgccagcgtgtacgatgcggcgcatccacgcgccaaacgggggaaataatgcgtttttaccggcctttggggcgcatcagcgcgctcacctttgacctggatgataccctttacgataaccgtccggtgattttgcgcaccgagcgagaggcgcttacctttgtgcaaaattatcatccggcgctgcgcagcttccagaatgaagatctgcaacgcctgcgccaggcggtacgggaagcggaacccgagatttatcacgacgtgacgcgctggcgttttcgtagcattgaacaagcgatgctcgacgccgggctgagtgccgaagaagccagtgcaggcgcacacgcagcaatgatcaactttgccaaatggcgcagccgaatcgacgtcccgcagcaaactcacgacaccttaaaacagctggcgaagaaatggccgctggtggcgatcaccaacggtaacgcccagccggagctgtttggtttgggggattattttgagtttgtgctgcgcgctggcccgcacgggcgcagtaaaccgttcagcgatatgtactttttggctgcggaaaaactcaacgtgccgatcggcgagatcttacatgttggggacgatctcaccactgacgtgggtggggcaattcgcagcggaatgcaggcttgttggatcagaccggaaaatggcgatctgatgcaaacctgggacagccgtttactgccgcatctggaaatttcccggttggcatctctgaccagcctgatataatcagcaaatctgtatatatacccagctttttggcggagggcgttgcgcttctccgcccaacctatttttacgcggcggtgccaatggacgtttcttacctgctcgacagccttaatgacaaacagcgcgaagcggtggccgcgccacgcagcaaccttctggtgctggcgggcgcgggcagtggtaagacgcgcgtactggtgcatcgtatcgcctggttgatgagcgtggaaaactgcagcccatacagcattatggcggtgacgtttaccaacaaagcggcggcggagatgcgtcatcgtatcgggcaactgatgggcacgagccagggcggtatgtgggtcggcaccttccacgggctggcgcaccgtttgctgcgtgcgcaccatatggacgccaatctgccgcaggatttccagatcctcgacagtgaagaccagctacgcctgcttaagcgtctgatcaaagccatgaacctcgacgagaagcagtggccgccgcggcaggcaatgtggtacatcaacagccagaaagatgaaggcctgcgtccgcatcatattcaaagctacggtaatccggtggagcagacctggcagaaggtgtatcaggcgtatcaggaagcgtgtgaccgcgcgggcctggtggacttcgccgagctgctgctgcgcgctcacgagttgtggcttaacaagccgcatatcctgcaacactaccgcgaacgttttaccaatatcctggtggacgaattccaggataccaacaacattcagtacgcgtggatccgcctgctggcgggcgacaccggcaaagtgatgatcgtcggtgatgacgaccagagtatctacggctggcgcggggcgcaggtggagaatattcagcgtttccttaatgatttccccggtgccgaaactattcgtctggagcaaaactaccgctctaccagcaatattctgagcgccgctaacgccctgattgaaaacaataacgggcgtctgggtaaaaaactgtggaccgatggcgcggacggtgagcctatttccctctattgcgcttttaacgaactcgatgaagcgcgttttgtggttaaccgcatcaaaacctggcaggacaacggcggagcgcttgccgagtgcgccattctctaccgcagcaacgcccagagccgggtgctcgaagaggcgttattgcaggccagtatgccgtaccgtatttacggcgggatgcgcttcttcgaacgccaggaaatcaaagatgcgctcagctatctgcgcctgattgccaaccgcaacgacgacgcggcctttgagcgtgtggtgaatacgccaacgcggggtattggtgaccggacgctggacgtggtacgtcagacaagccgcgatcgccagttaacactctggcaggcatgtcgtgagctgttgcaggaaaaagccctcgccgggcgagctgccagcgccttgcagcgatttatggaattaatcgacgccttagcgcaggaaactgccgatatgccgctgcatgtacagactgaccgggtaattaaagactccggcctgcgtaccatgtatgagcaggagaagggcgaaaaaggtcagacgcgtatcgaaaacttagaggaactggtgacggcaacgcgccagttcagctacaacgaagaagacgaagatttaatgccgctgcaggcgttcctctcccatgcggcactggaagcaggtgaagggcaggcggatacctggcaggatgcggtgcagttgatgacgctacacagcgcgaaaggcctggagttcccgcaggtgtttatcgttggtatggaagagggcatgttcccaagccagatgagcctggatgaaggcgggcgtctggaagaagaacgccgtctggcctacgttggcgtaacccgcgcgatgcagaaactgacgctgacctacgcggaaacccgccgtctgtatggtaaagaggtttaccatcgcccgagccgctttatcggcgagctgccggaagagtgtgtggaagaggtgcgcctgcgcgccacggtaagccgcccggtcagccatcagcggatgggtacgccgatggtcgagaacgacagcggctacaagctcggccagcgcgtacgccacgctaagtttggtgaaggcaccattgtcaatatggaaggcagcggtgagcatagccgtttgcaggtggcatttcagggccagggtattaaatggctggtggcggcatacgcccggctggagagcgtgtaacgttgccggatgcggtgctgcgcaccttatttggcctaaaaaatcattcagattcaataaattgcaacgtcatgtaggccggatagggcgtttacgccgcatccggcatctgcgccatcttcagtatctgacacaaaactatcgttttaacctttccgctcgacggaaatcatggtgacaaaaggatagcgttgccacgggattgccccgcctttcatatacatatgactaatcgtgccatcaagataaagcagctgctcaacgttcagtttcgctttggcataacaggcaaaatcataaaaatttgttgcctgctggctcaacaaaaacacggcgttcccatgtttattaatcccaacaccgttacgaattttgctactggcgacgttgggatgaatacgcggattaattacaccgttttccatcaacattggcccactctgcaccgcaaactgaatctctttactggttttgaaggcatccagacgaacgatgccgactttatctcccgcgacataaaacacgccgccaggacggataaagaaattcccttcaccactagcgagatttaacgccaccttctgctgaccgttttcgatgtacaaaccgagcggcgcatagctttcatcatagatgccgccgttcatcgccatctgcacctgaccctgactattaatatccgccagcagagcatgtaacgttccccacgcttcgccattggctttttgccagtacattttcacccgctctgtttgaggattaacggtatacgcctgtacggtcagcgtcggatcactgagtgcgcaatcatcagcggcaacagcaaacaagggaagtaaggtgagggcgagaaaaatccgtttgagattcaaggtgatcattcctttaccaatgagtagctgatgcgccattataggtcctggatgtgggatttttttatcctgttagcgaccttgacgagtaccaaaaagcgcgaagttcaactattgttctgtggtgttctgttgcgtgttgacggcaaaattttgctggcgtaacatgcgcgcacgatcactctaagaggacattcgccttggacacacccagtagatactggctcactatcctgtcatccaggatcaactcctaaggctatccctttttgctgatagccttagcggttgtcagcgacctcaatttttcccgtcgcgctgagtcaggctgtttaatggtctgaaacccaatttgtttctgtgtgcccaccgaactgtccgatattttaagcattgggagtcccggtcatgctgagcgcatttcaactggaaaataaccgactgacccggctggaagtcgaagagagtcaaccccttgtaaatgcagtatggattgatcttgtcgaaccggacgacgacgagcgactgcgcgtacaatctgaacttggccagagcctggcaacccgcccggaactggaagacatcgaagcaagcgcacgtttctttgaagacgacgacggcctgcatattcactccttcttcttctttgaagatgcggaagatcacgccggtaactccactgtggcatttaccatccgtgatggtcgtctgtttactctgcgtgagcgtgaactgcccgcttttcgtctgtatcgtatgcgtgcccgtagccagagcatggtagacggtaacgcctacgagttgctgctggatctgttcgaaaccaaaatcgaacagttggcagatgaaattgaaaatatctatagcgacctggagcagttgagccgggtgattatggaagggcatcagggcgatgagtacgacgaggcgctctccactctggcggaactggaagatatcggctggaaagttcgcctgtgtctgatggatacccagcgcgcgctcaacttcctggtgcgtaaagcgcgtttaccgggtgggcaactggagcaggcgcgtgaaatcctgcgagatatcgaatccctgctgccgcataacgaatccctgttccagaaggtgaacttcctgatgcaggcggcaatgggttttatcaacatcgagcagaaccgcatcatcaaaatcttcagcgtggtatccgtggtattcctgccgccgacgctcgttgcttccagctatggcatgaactttgagtttatgccagaactgaagtggagcttcggctaccctggcgcgattatctttatgatcctcgcgggcctggcaccgtatctgtactttaagcggaagaactggttgtaaaaaacgagagcggtggcttagtctggctaagccacctgttattcaaaggctccaggtatttaacccttttacctctttctcatagaaccatttgttcgtgttaacagcaacataggctgctacggcaattcccagaatgttaacgccaattagtgcaccaacaaatagagatagaataccaagtaatagaactataattgcttttttccataaccccaggacaaataaatatatccaggaacagaagaaagcaatgaaattcatttgaatagttaagcgttgtcttacttttaatgctttaaatgctgctttatattctggtgttgccccccagaatccaggaaaaccatgttgatcataaaaattaaatcggtatttccatttttcacttaaactaccatcgttcatatattccttactcataaatactccataattattgtttactactatcagtaggtgcaagcattagcatactgaaagtggaaaaataacaaatcaaaaaaatcatgctaccattgccactacaggcaaaatcttcggctatcattgtgatgatagagatgatatatactgctaatgtaccaaaaacataagtttttatatagatgaaaccactatcacggagtcgctggcaattcatgttgatgacgagataatggagtacgatggtagagactataacaagaaagcctgcttctccatcgttaaaaaagataataagaaaggcaaaaatgaaatttattaaaataaaactaaatatataacgacgtctggaaatcttaccgttagatgttgggataaatatacgtaacataaattttacatccttgtatgagtctccggtcagcatggcaatatgcccactctcatgcaagagtcggcatattttttcagaatatatttattttttatttggacgttctacgctgcgtataaatcgcatccatcacaaaaattgccagcgccacccaaataaaggcgaaagtcaccatcttatcggcacccggtttttcaccataaaacgtcacagccagcaggaacatcagcgtcgggccaatgtactggaaaaagcctaacgtactgagacgcaagcgcgtggcagcggcggtaaaacacaacagcggtacggtagtgacaataccggcggcgatcagcagtaaattcaggctcatcgggttttgccccatatggctggtactgctgtcggcaatagcaaacaggtaaattgccgccacgggcagcagccacatggtttcgattaacatgccggtttgcgcttcaacggcaatcttcttgcgtaccagaccgtagaaggcaaaactaaatgccagtcccagcgcgataataggtaggctaccaaaagtccacagctggactaacacgccacatatcgccagaatcaccgccagccattgcatccggcggaatcgctcgccgaggaaaatcatccccagcacaatgttcaccagcgggttaataaagtaaccaaggctcgcttccagcatatggtgattgttcaccgcccagataaacagtagccagttgccaccaatcagcacggcagagactgccagcataaaaattttctgtggcgtctgaatcagcgtttttaaataggaccactggcggcaaatgctcatcagcaccaccataaagaaaaagctccagatcacgcgatgcgtcaggatttcatcggcgggcacgtagtaaatcaacttgaagtacgctggcgctataccccaaataaaataagcggcaagagcgagtaatacgccctgccgcgtttgttttgcatccatcgggaatactcatttttaattggtaacagcagtttacctgcttttatgtcttcaacctaccatataggtggcggtggcactggcaatataaagctgttcttcattgtgtaattcaacgcgggcgacggcgactttattgcctgcacgcaacaggctactagtagcagtaaaacgctcgcccctgcctgggcgcagataatcaacgcgaagatcaatggtccccatccggcttagccgctggcgtagttcatcttcactgatggtttcgtggcgggttaaggtacttcccacgcacaccagaccggcggcgacatccagcgcgctcgcaatgaccccgccgtgcaaaatgctttgcgcccagttgcccaccatcattggctgatttttaaaggccagctgtgcgaactctttttcgtaacgctccagttccatccccaatgcgcggttaaatggcatgtgataaacaaacatctcacccactaatttcagggcttgttcagcggtcagtacggcagacatatcatccttacacttcattggttaatgaaatgttgattttatgcttctttgttgttggtttctactttaggaagggataactaacggctatggagttaagtatgtaaaatagcccgcagaaaaatattcaccttatcaataattcgttacggagaacacgaccgatgcggactctgcagggctggttgttgccggtgtttatgttgcctatggcagtatatgcacaagaggcaacggtgaaagaggtgcatgacgcgccagcggtgcgtggcagtattatcgccaatatgctgcaggagcatgacaatccgttcacgctctatccttatgacaccaactacctcatttacacccaaaccagcgatctgaataaagaagcgattgccagttacgactgggcggaaaatgcgcgtaaggatgaagtaaagtttcagttgagcctggcatttccgctgtggcgtgggattttaggcccgaacagcgtgttgggtgcgtcttatacgcaaaaatcctggtggcaactgtccaatagcgaagagtctagtccgtttcgtgaaaccaactacgaaccgcaattgttcctcggttttgccaccgattaccgttttgcaggttggacgctgcgcgatgtggagatggggtataaccacgactctaacgggcgttccgacccgacctcccgcagctggaaccgcctttatactcgcctgatggcagaaaacggtaactggctggtagaagtgaagccgtggtatgtggtgggtaatactgacgataacccggatatcaccaaatatatgggttactaccagcttaaaatcggctatcacctcggtgatgcggtgctcagtgcgaaaggacagtacaactggaacaccggctacggcggcgcggagttaggcttaagttacccgatcaccaaacatgtgcgcctttatactcaggtttacagcggctatggcgaaagcctcatcgactataacttcaaccagacccgtgtcggtgtgggggttatgctaaacgatttgttttgatgaacggttgagtggttggcaaatctggaatccagcatccaggattaccctctcagagactaaaagcattgcagtttctcgcgcaggcgctgaaaatagcgcctgtttttatttcaggcaatcggggtgaatgtggcgcaggcggaagtgttgaatctggagtccggagctaaacaggttttacaagaaacctttggctaccaacagtttcgccccggccaggaagaaattatcgacactgtgctttccggccgcgattgcctcgtcgtcatgcccactggtggcggaaaatccctttgctatcaaatccctgccttattgctaaacggccttaccgtggttgttagtccgctgattagcttgatgaaagatcaggtggatcaactgcaagccaacggcgtggcggcggcgtgccttaacagcacgcaaacccgcgaacagcaacttgaagtgatgacaggctgccgcaccgggcaaattcgtctgctttatatcgccccggaacgcctgatgctggataactttcttgagcatctggcgcactggaatccggtgttattagccgttgatgaagcgcactgtatctcccaatggggccacgatttccgcccggaatatgccgcgctcggtcagttgcgccagcggttcccgacgctgccgtttatggcgctgaccgccacagccgacgacaccacgcgccaggatatcgtgcgcctgctggggctgaacgatccgctgattcaaatcagcagttttgaccgtccgaatattcgctacatgctgatggagaagttcaaaccgctcgatcagttgatgcgctacgtgcaggaacagcgcggtaagagtggcattatctactgcaacagccgcgcgaaagtagaagacaccgctgcgcgcctgcaaagcaagggaattagcgcggcggcctatcatgccgggctggaaaataatgttcgcgccgatgtgcaggaaaaattccagcgcgatgacctgcaaattgtggtggcgacggtggcgttcggcatgggcatcaataaaccaaacgttcgcttcgtggtccactttgatattccgcgcaatatcgaatcctattatcaggaaaccggacgcgccgggcgtgatggcctgcccgcggaagcgatgctgttttacgatccggctgatatggcgtggctgcgccgttgtctggaagagaagccgcaggggcagttgcaggatatcgagcgccacaaactcaatgcgatgggcgcgtttgccgaagcgcaaacttgccgtcgtctggtattgctgaactattttggcgaagggcgtcaggagccgtgcgggaactgcgatatctgcctcgatccgccgaaacagtacgacggtagtaccgatgctcagattgccctttccaccattggtcgtgtgaatcagcggtttgggatgggttatgtggtggaagtgattcgtggtgctaataaccagcgtatccgcgactatggtcatgacaaactgaaagtctatggcatgggccgtgataaaagccatgaacattgggtgagcgtgatccgccagctgattcacctcggcctggtgacgcaaaatattgcccagcattctgccctacaactgacagaggccgcgcgcccggtgctgcgcggcgaatcctctttgcaacttgccgtgccgcgtatcgtggcgctcaaaccgaaagcgatgcagaaaagcttcggcggcaactatgatcgcaaactgttcgccaaattacgcaaactgcgtaaaagcatagccgatgaaagtaatgtcccgccgtacgtggtgtttaacgacgcaaccttgattgagatggctgaacagatgccgatcaccgccagcgaaatgctcagcgttaacggcgttgggatgcgcaagctggaacgctttggcaaaccgtttatggcgctgattcgtgcgcatgttgatggcgatgacgaagagtaatcagcagcataaaaaagtgccagtatgaagactccgtaaacgtttcccccgcgagtcaaatgtatgttgatgttatttctcaccgtcgccatggtgcacattgtggcgcttatgagccccggtcccgatttcttttttgtctctcagaccgctgtcagtcgttcccgtaaagaagcgatgatgggcgtgctgggcattacctgcggcgtaatggtttgggctgggattgcgctgcttggcctgcatttgattatcgaaaaaatggcctggctgcatacgctgattatggtgggcggtggcctgtatctctgctggatgggttaccagatgctacgtggtgcactgaaaaaagaggcggtttctgcacctgcgccacaggtcgagctggcgaaaagtgggcgcagtttcctgaaaggtttactgaccaatctcgctaatccgaaagcgattatctactttggcagcgtgttcagtttgtttgtcggtgataacgttggcactaccgcgcgctggggcatttttgcgctgatcattgtcgaaacgctggcgtggtttaccgtcgttgccagcctgtttgccctgccgcaaatgcgccgtggttatcaacgtctggcgaagtggattgatggttttgccggggcgttatttgccggatttggcattcatttgattattagccggtgatgccagacgcgtcttcagagtaagtcggataaggcgtttacgccgcatccgacattatttttcacgcatgcctcgcgcttgctaacagcgctcccaccagcataaacaagctgccgaaaatcttattcagcgccttcatctgctttggtcctttaatccatagagcaatccgttgagcaagggtggcgtaaccgatcatcacaataatatcgaccacaatagtggtgacgccgagcacgatatactgcatcagttgcggctgttgcggcatgatgaattgcggaaatagcgccgccagaaacacaatacttttgggattggtgagattcacaaaaactgcgcgctggaacaaatgtcgacggctttgagtagaggccaggcttttaaggtcaattgcaccagcggcgcgccactgctggattcccagccaaatcaagtaagccgcgcctgcccacttcaacacttcaaacgcaatcacactgcgggaaaatagcgtccccaaccccacgccaaccagcacaatatgaatcgccagtccggtctgaagcccagcaatagacgccaccgcgccgcgataaccgtggttgaggctggtggtcatagtgttgattgcaccagagcctgggctcaggcttaaaatgatgcttgtcagcaggtaggcaaaccaccattctaaggtcatgatgaactcccggtgtgtctatttttgtgccacaatacgctactgtcgcagcgttgtgtcaggcacgctaaaaaaaacgattttacgtggtttaagaggcagattacccgatgtttcagcagcaaaaagactgggaaacaagagaaaacgcgtttgctgcttttaccatgggaccgctgactgatttctggcgtcagcgtgatgaagcagagtttactggtgtggatgacattccggtgcgctttgtccgttttcgcgcacagcaccatgaccgggtggtagtcatctgcccggggcgtattgagagctacgtaaaatatgcggaactggcctatgacctgttccatttggggtttgatgtcttaatcatcgaccatcgcgggcagggacgttccggtcgcctgttagccgatccgcatctcgggcatgttaatcgctttaatgattatgttgatgatctggcggcattctggcagcaggaggttcagcccggtccgtggcgtaaacgctatatactggcacatagcatgggcggtgcgatctccacattatttctgcaacgccatccaggtgtatgtgacgccattgcgctaactgcgccaatgtttgggatcgtgattcgtatgccgagttttatggcacggcagatcctcaactgggccgaagcgcatccacgtttccgtgatggctatgcaataggcaccgggcgctggcgcgcgttgccgtttgctatcaacgtactgacccacagcagacagcgatatcgacgtaacttacgcttctatgctgatgacccaacgattcgcgtcggtgggccgacctaccattgggtacgcgaaagtattctggctggcgaacaggtgttagccggtgcgggtgatgacgccacgccaacgcttctcttgcaggctgaagaggaacgcgtggtggataaccgcatgcatgaccgtttttgtgaactccgcaccgccgcgggccatcctgtcgaaggaggacggccgttggtaattaaaggtgcttaccatgagatcctttttgaaaaggacgcaatgcgcagtgtcgcgctccacgccatcgttgattttttcaacaggcataacagtcccagcggaaaccgctctacagaggtttaaatttcttatgtaccaggttgttgcgtctgatttagatggcacgttactttctcccgaccatacgttatccccttacgccaaagaaactctgaagctgctcaccgcgcgcggcatcaactttgtgtttgcgaccggtcgtcaccacgttgatgtggggcaaattcgcgataatctggagattaagtcttacatgattacctccaatggtgcgcgcgttcacgatctggatggtaatctgatttttgctcataacctggatcgcgacattgccagcgatctgtttggcgtagtcaacgacaatccggacatcattactaacgtttatcgcgacgacgaatggtttatgaatcgccatcgcccggaagagatgcgcttttttaaagaagcggtgttccaatatgcgctgtatgagcctggattactggagccggaaggcgtcagcaaagtgttcttcacctgcgattcccatgaacaactgctgccgctggagcaggcgattaacgctcgttggggcgatcgcgtcaacgtcagtttctctaccttaacctgtctggaagtgatggcgggcggcgttagtaaaggccatgcgctggaagcggtggcgaagaaactgggctacagcctgaaggattgtattgcgtttggtgacgggatgaacgacgccgaaatgctgagcatggcggggaaaggctgcattatgggcagtgcgcaccagcgtctgaaagaccttcatcccgagctggaagtgattggtactaatgccgacgacgcggtgccgcattatctgcgtaaactctatttaagctaatcgttctttatttggtcagttgtcaacctgatacttcgctacaatggatacccgttaatcaaagagttttccattgtggcgctacttatcatcaccacgattctgtgggccttctcctttagcttttatggcgagtaccttgcggggcacgtcgatagctattttgcggtgctggtgcgcgttggcctggcggcactcgtttttctgccgtttctgcgtacccgtggcaatagcctgaaaacggtcggcctgtatatgctggtgggcgcgatgcagcttggcgtgatgtatatgctgagtttccgcgcttatctctacctgacggtttccgagctgctgctgttcaccgtgctgacgccgctctacatcacgctgatttatgacatcatgagtaagcgccgtctgcgctggggctatgcctttagcgccttgctggcggtgattggtgccgggattattcgctatgatcaggtcaccgaccatttctggactggcttgctgctggtgcaactctccaatatcacttttgccattggcatggtgggttacaaacgcctgatggaaactcgcccgatgccacagcataacgcctttgcgtggttctatcttggcgcgtttctggtggcagtgattgcatggttcttgctgggaaatgcgcagaaaatgccgcaaaccacgctgcaatggggcattctggtgtttcttggcgtggtggcttccgggattggctactttatgtggaactacggcgcgacgcaggtggacgccggaacgctgggcattatgaataatatgcacgttccggcagggctgctggtaaacctggctatctggcaccaacagccgcactggccaacgtttattacaggcgcgctggtgatcctggccagtctgtgggtgcatcgtaagtgggtcgctccgcgctctagtcaaacggcagatgatcgcaggcgtgattgcgcgctgagcgaataattacaggcgcgctggacttcctggcctcactgtgggtgcatcgtaagtgggtcgctccgcgctcttcacaaacggcagatgatcgcaggcgtgattgcgcgcactgcgaataaacgcttccgtaactggctgacgctgctcgccatcgcgcacggcggcgtacagtcggctccacaagccttcgcccagggttttggtcaccaccagaccctggcgctcaaaactctctactacccaatgcggtagcgcggcaatacccatccgcgcggcaaccatctgaatcaacaataaggtgttatcgacgcttttcagactcgggctgacgcctgccggctgaagaaaatgccgccagacatccagtcgactacgctgcaccggataaattaatagcgtctcgctggcgagatcttccggtgtaattcgcgttttcgccgccagtggatggtcaggtgctaacaccagacgcacttcatagtcgaacatcgggctataatgcaggccactgcgcggcagaatatcggacgtcattaccagatccagctctccctgttgcaaggcgggctgcgggtcaaatgtcacgccgcttttaaaatccatctctacctgcggccagttcttatggaaattttctaacgcgggtgtcagccactgaatacagctatggcactcaatggcaatgcgcagacgcgtctgctgcggttcattgcaggcttgcagggcctggctaatttgcggcagtacctggtttgccagttgcaacaggatttctccctgcggtgtaaagcgtagcggctggctcttacgcacaaatagccggaagccaaggcgttgttccagatcgctaaactggtgagacagggcggattgcgtctgatgcaacgtcgccgcagcggctgcgaggctgccgcagttccgcaacgcttgtagcgttttcaggtgttttacttcgatcatgaaagtccttcacttcggcatgaataatttgcgcttgaggaatatacagtaaccgccaattatggatgtgtaaacatctggacggctaaaatccttcgtcttttaaatttatggtgcgttggctgcgtttctccaccccggtcacttacttcagtaagctcccggggatgaataaacttgccgccttccctaaattcaaaatccataggatttacatataattagaggaagaaaaaatgacaatattgaatcacaccctcggtttccctcgcgttggcctgcgtcgcgagctgaaaaaagcgcaagaaagttattgggcggggaactccacgcgtgaagaactgctggcggtagggcgtgaattgcgtgctcgtcactgggatcaacaaaagcaagcgggtatcgacctgctgccggtgggcgattttgcctggtacgatcatgtactgaccaccagtctgctgctgggtaacgttccggcgcgtcatcagaacaaagatggtagcgtagatatcgacaccctgttccgtattggtcgtggacgtgcgccgactggcgaacctgcggcggcagcggaaatgaccaaatggtttaacaccaactatcactacatggtgccggagttcgttaaaggccaacagttcaaactgacctggacgcagctgctggacgaagtggacgaggcgctggcgctgggccacaaggtgaaacctgtgctgctggggccggttacctggctgtggctggggaaagtgaaaggtgaacaatttgaccgcctgagcctgctgaacgacattctgccggtttatcagcaagtgctggcagaactggcgaaacgcggcatcgagtgggtacagattgatgaacccgcgctggtactggaactaccacaggcgtggctggacgcatacaaacccgcttacgacgcgctccagggacaggtgaaactgctgctgaccacctattttgaaggcgtaacgccaaatctcgacacgattactgcgctgcctgttcagggtctgcatgttgacctcgtacatggtaaagatgacgttgctgaactgcacaagcgcctgccttctgactggttgctgtctgcgggtctgatcaatggtcgtaacgtctggcgcgccgatcttaccgagaaatatgcgcaaattaaggacattgtcggcaaacgtgatttgtgggtggcatcttcctgcagcttgctgcacagccccatcgacctgagcgtggaaacgcgtcttgatgcagaagtgaaaagctggtttgccttcgccctacaaaaatgccatgaactggcactgctgcgcgatgcgctgaacagtggtgacacggcagctctggcagagtggagcgccccgattcaggcacgtcgtcactctacccgcgtacataatccggcggtagaaaagcgtctggcggcgatcaccgcccaggacagccagcgtgcgaatgtctatgaagtgcgtgctgaagcccagcgtgcgcgttttaaactgccagcgtggccgaccaccacgattggttccttcccgcaaaccacggaaattcgtaccctgcgtctggatttcaaaaagggcaatctcgacgccaacaactaccgcacgggcattgcggaacatatcaagcaggccattgttgagcaggaacgtttgggactggatgtgctggtacatggcgaggccgagcgtaatgacatggtggaatactttggcgagcacctcgacggatttgtctttacgcaaaacggttgggtacagagctacggttcccgctgcgtgaagccaccgattgtcattggtgacattagccgcccggcaccgattaccgtggagtgggcgaagtatgcgcaaagcctgaccgacaaaccggtgaaagggatgctgacggggccggtgaccatactctgctggagcttcccgcgtgaagatgtcagccgtgaaaccatcgccaaacagattgcgctggcgctgcgtgatgaagtggccgatctggaagccgctggaattggcatcatccagattgacgaaccggcgctgcgcgaaggtttaccgctgcgtcgtagcgactgggatgcgtatctccagtggggcgtagaggccttccgtatcaacgccgccgtggcgaaagatgacacacaaatccacactcacatgtgttattgcgagttcaacgacatcatggatagcattgcggcgctggacgcagacgtcatcaccatcgaaaccagccgttccgacatggagttgctggagagctttgaagagtttgattatccaaatgaaatcggtcctggcgtctatgacattcacagcccaaacgtaccgagcgtggaatggattgaagccttgctgaagaaagcggcaaaacgcattccggcagagcgcctgtgggtcaacccggactgtggcctgaaaacgcgcggctggccagaaacccgcgcggcactggcgaacatggtgcaggcggcgcagaacttgcgtcgggggtaaaatccaaaccgggtggtaataccacccggtcttttctcattacaggctcttcttcccaccatactgcttaaaccattccagcatacgctgccagccatcttctgcagatgcggcatgatagctcgggcgataatcagcgttgaatgcatgcccggcgtccgggtacacgataatctctgctttcgcattagcagcccgcagcgcctggcgcatggtttcaacgctctcctgcggaatgctgttatcctgaccaccatataagccgagaatcggcgcgttaagatcggttgcgatatcaacaggttgtttcggactattcaggctcttgtcgcccgtcagtttgccgtaccacgccactgcggcttttagctgtggattatgcgcggcatacagccaggtgatacgtccaccccagcagaatccggtgatcattaaacgatgaacatcgccgccgttgcgggaagcccaactggcgacatgatcgagatcggccagcacctggctgtcaggcacttttgctaccagaccgctaagcaacgtggggatatcggcaaaatcattcggatcgccttcgcggaagtaaagttcaggtgcgatagccagatacccctccagcgccagacggcgacaaatgtcgcggatatgttcatgcacgccaaaaatttcctgcactacaatgaccactggcagtgggccatcgctttgctttggtctggcatggtaagcaggcatgttatccccttgactagggatagaggtgaagcccgccacaatcgcgtcgtccggggtctgaacgatggtgctagcgagagggcttgcagcaggtgcaaatccagattgttgtgttgttgccatggtattctccgtacccttataaaaatgttgcgcaatgttaactatagtcagcatgcaacaaatcacattgcctgaatcggctcatcttttatgcagtcctgcagaatgaagggtgatttatgtgatttgcatcacttttggtgggtaaatttatgcaacgcatttgcgtcatggtgatgagtatcacgaaaaaatgttaaacccttcggtaaagtgtctttttgcttcttctgactaaaccgattcacagaggagttgtatatgtccaagtctgatgtttttcatctcggcctcactaaaaacgatttacaaggggctacgcttgccatcgtccctggcgacccggatcgtgtggaaaagatcgccgcgctgatggataagccggttaagctggcatctcaccgcgaattcactacctggcgtgcagagctggatggtaaacctgttatcgtctgctctaccggtatcggcggcccgtctacctctattgctgttgaagagctggcacagctgggcattcgcaccttcctgcgtatcggtacaacgggcgctattcagccgcatattaatgtgggtgatgtcctggttaccacggcgtctgtccgtctggatggcgcgagcctgcacttcgcaccgctggaattcccggctgtcgctgatttcgaatgtacgactgcgctggttgaagctgcgaaatccattggcgcgacaactcacgttggcgtgacagcttcttctgataccttctacccaggtcaggaacgttacgatacttactctggtcgcgtagttcgtcactttaaaggttctatggaagagtggcaggcgatgggcgtaatgaactatgaaatggaatctgcaaccctgctgaccatgtgtgcaagtcagggcctgcgtgccggtatggtagcgggtgttatcgttaaccgcacccagcaagagatcccgaatgctgagacgatgaaacaaaccgaaagccatgcggtgaaaatcgtggtggaagcggcgcgtcgtctgctgtaattctcttctcctgtctgaaggccgacgcgttcggccttttgtatttttgcgtagcgcctcgcaggaaatgcctttccaactggacgtttgtacagcacaattctattttgtgcgggtaagttgttgcgtcaggaggcgttgtggatttcagtatcatggtttacgcagttattgcgttggtgggtgtggcaattggctggctgtttgccagttatcaacatgcgcagcaaaaagccgagcaattagctgaacgtgaagagatggtcgcggagttaagcgcggcaaaacaacaaattacccaaagcgagcactggcgtgcagagtgcgagttactcaataacgaagtgcgcagcctgcaaagtattaacacctctctggaggccgatctgcgtgaagtaaccacgcggatggaagccgcacagcaacatgctgacgataaaattcgccagatgattaacagcgagcagcgcctcagtgagcagtttgaaaacctcgccaaccgtatttttgagcacagcaatcgccgggttgatgagcaaaaccgtcagagtctgaacagcctgttgagcccgctacgtgaacaactggacggtttccgccgtcaggttcaggacagcttcggtaaagaagcacaagaacgccataccctgacccacgaaattcgcaatctccagcaactcaacgcgcaaatggcccaggaagcgatcaacctgacgcgcgcgctgaaaggcgacaataaaacccagggcaactggggcgaggtagtattgacgcgggtgttggaggcttccggtctgcgtgaagggtatgaatatgaaacccaggtcagcatcgaaaatgacgcccgcagccggatgcagccggatgtcatcgtgcgcctgccgcagggaaaagatgtggtgatcgacgccaaaatgacgctggtcgcctatgaacgctattttaacgccgaagacgactacacccgcgaaagcgcgctacaggaacatatcgcgagcgtgcgtaaccatatccgtttgctgggacgcaaagattatcaacagctgccggggctgcgaactctggattacgtgctgatgtttattcccgttgaacccgcttttttactggcgcttgaccgccagccggagctgatcaccgaagcgttgaaaaacaacatcatgctggttagcccgactacgctgctggtggcgctgcgcactatcgccaacctgtggcgttatgagcatcaaagccgcaacgcccagcaaatcgccgatcgtgccagcaagctgtacgacaagatgcgtttgttcatcgatgacatgtccgcgattggtcaaagtctcgacaaagcgcaggataattatcggcaggcaatgaaaaaactctctagtgggcgcggaaatgtgctggcgcaggcagaagcgtttcgcggtttaggagtagaaattaaacgcgagattaatccggatttggctgaacaggcggtgagccaggatgaagagtatcgacttcggagcgttccggagcagccgaatgatgaagcttatcaacgcgatgatgaatataatcagcagagccgctaacccattgggagtagttaagccgggtagaaatctagggcatcgacgcccaatctgttacacttctggaacaattttttgatgagcaggcattgagatggtggataagagtcaagaaacgacgcactttggttttcagaccgtcgcgaaggaacaaaaagcggatatggtcgcccacgttttccattccgtggcaagtaaatacgatgtcatgaatgatttgatgagttttggtattcatcgtttgtggaagcgattcacgattgattgcagcggcgtacgccgtgggcagaccgtgctggatctggctggtggcaccggcgacctgacagcgaaattctcccgcctggtcggagaaactggcaaagtggtccttgctgatatcaatgaatccatgctcaaaatgggccgcgagaagctgcgtaatatcggtgtgattggcaacgttgagtatgttcaggcgaacgctgaggcgctgccgttcccggataacacctttgattgcatcaccattagctttggtctgcgtaacgtcaccgacaaagataaagcactgcgtagtatgtatcgcgtgctgaaacccggcggccgcctgctggtgcttgagttcagcaagccaattatcgagccgctgagcaaagcctatgatgcatactccttccatgtgctgccgcgtattggcagtctggtcgcgaacgacgccgacagctaccgttatctggcagaatccatccgtatgcatcccgatcaggataccctgaaagccatgatgcaggatgccggattcgaaagtgtcgactactacaatctgacggcaggggttgtggcgctgcatcgtggttataagttctgacaggagaccggaaatgccttttaaacctttagtgacggcaggaattgaaagtctgctcaacaccttcctgtatcgcagtcccgcgctgaaaacggcccgcagccgtctgctgggtaaagtattgcgcgtggaggtaaaaggctttagcacgagtttgattctggtgttcagcgaacgccaggttgatgtactgggcgaatgggcaggcgatgctgactgcaccgttatcgcctacgccagtgtgttgccgaaacttcgcgatcgccagcagcttaccgcactgattcgcagtggtgagctggaagtgcagggcgatattcaggtggtgcaaaacttcgttgcgctggcagatctggcagagttcgaccctgcggaactgctggccccttataccggtgatatcgccgctgaaggaatcagcaaagccatgcgcggaggcgcaaagttcctgcatcacggcattaagcgccagcaacgttatgtggcggaagccattactgaagagtggcgtatggcacccggtccgcttgaagtggcctggtttgcggaagagacggctgccgtcgagcgtgctgttgatgccctgaccaaacggctggaaaaactggaggctaaatgacgccaggtgaagtacggcgcctatatttcatcattcgcacttttttaagctacggacttgatgaactgatccccaaaatgcgtatcaccctgccgctacggctatggcgatacagtttattctggatgccaaatcggcataaagacaaacttttaggtgagcgactacgactggccctgcaagaactggggccggtttggatcaagttcgggcaaatgttaagtacccgccgcgatctttttccaccgcatattgccgatcagctggcgttattgcaggacaaagttgctccgtttgatggcaagctggcgaagcagcagattgaagctgcaatgggcggcttgccggtagaagcgtggtttgacgattttgaaatcaagccgctggcttctgcttctatcgcccaggttcataccgcgcgattgaaaagcaatggtaaagaggtggtgattaaagtcatccgcccggatattttgccggttattaaagcggatctgaaacttatctaccgtctggctcgctgggtgccgcgtttgctgccggatggtcgccgtctgcgcccaaccgaagtggtgcgcgagtacgaaaagacattgattgatgaactgaatttgctgcgggaatctgccaacgccattcagcttcggcgcaattttgaagacagcccgatgctctacatcccggaagtttaccctgactattgtagtgaagggatgatggtgatggagcgcatttacggcattccggtgtctgatgttgcggcgctggagaaaaacggcactaacatgaaattgctggcggaacgcggcgtgcaggtgttcttcactcaggtctttcgcgacagctttttccatgccgatatgcaccctggcaacatcttcgtaagctatgaacacccggaaaacccgaaatatatcggcattgattgcgggattgttggcagcctaaacaaagaagataaacgctatctggcagaaaactttatcgccttctttaatcgcgactatcgcaaagtggcagagctacacgtcgattctggctgggtgccaccagataccaacgttgaagagttcgaatttgccattcgtacggtctgtgaacctatctttgagaaaccgctggccgaaattagctttggacatgtactgttaaatctgtttaatacggcgcgtcgcttcaatatggaagtgcagccgcaactggtgttactccagaaaaccctgctctacgtcgaaggggtaggacgccagctttatccgcaactcgatttatggaaaacggcgaagcctttcctggagagctggattaaagatcaggtcggtattcctgcgctggtgagagcatttaaagaaaaagcgccgttctgggtcgaaaaaatgccagaactgcctgaattggtttacgacagtttgcgccagggcaagtatttacagcacagtgttgataagattgcccgcgagcttcagagtaatcatgtacgtcagggacaaagccgttattttctcggaattggcgctacgttagtattaagtggcacattcttgttggtcagccgacctgaatgggggctgatgcccggctggttaatggcaggtggtctgatcgcctggtttgtcggttggcgcaaaacacgctgattttttcatcgctcaaggcgggccgtgtaacgtataatgcggctttgtttaatcatcatctaccacagaggaacatgtatgggtggtatcagtatttggcagttattgattattgccgtcatcgttgtactgctttttggcaccaaaaagctcggctccatcggttccgatcttggtgcgagcatcaaaggctttaaaaaagcaatgagcgatgatgaaccaaagcaggataaaaccagtcaggatgctgattttactgcgaaaactatcgccgataagcaggcggatacgaatcaggaacaggctaaaacagaagacgcgaagcgccacgataaagagcaggtgtaatccgtgtttgatatcggttttagcgaactgctattggtgttcatcatcggcctcgtcgttctggggccgcaacgactgcctgtggcggtaaaaacggtagcgggctggattcgcgcgttgcgtagtctggcgacaacggtgcagaacgaactgacccaggagttaaaactccaggagtttcaggacagtctgaaaaaggttgaaaaggcgagcctcactaacctgacgcccgaactgaaagcgagcatggatgaactacgccaggccgcggagagcatgaagcgttcctacgttgcaaacgatcctgaaaaggcgagcgatgaagcgcacaccatccataacccggtggtgaaagataatgaagctgcgcatgagggcgtaacgcctgccgctgcacaaacgcaggccagtagcccggaacagaagccagaaaccacgccagagccggtggtaaaacctgctgcggacgctgaaccgaaaaccgctgcaccttcccctagcagcagtgataaaccgtaaacatgtctgtagaagatactcaaccgcttatcacgcatctgattgagctgcgtaagcgtctgctgaactgcattatcgcggtgatcgtgatattcctgtgtctggtctatttcgccaatgacatctatcacctggtatccgcgccattgatcaagcagttgccgcaaggtagtacgatgatcgccaccgacgtggccagcccgttctttacgccgatcaagctgacctttatggtgagcctgattctgagtgcgccggtgattctctatcaggtgtgggcatttatcgccccagcgctgtataagcatgaacgtcgcctggtggtgccgctgctggtttccagctctctgctgttttatatcggcatggcattcgcctactttgtggtctttccgctggcatttggcttccttgccaataccgcgccggaaggggtgcaggtatccaccgacatcgccagctatttaagcttcgttatggcgctgtttatggcgtttggtgtctcctttgaagtgccggtagcaattgtgctgctgtgctggatggggattaccagcccagaagacttacgcaaaaaacgcccgtatgtgctggttggtgcattcgttgtcgggatgttgctgacgccgccggatgtcttcagccaaacgctgttggcgatcccgatgtactgtctgtttgaaatcggtgtcttcttcagtcgcttttacgttggtaaagggcgaaatcgggaagaggaaaacgacgctgaagcagaaagcgaaaaaactgaagaataaattcaaccgcccgtcagggcggttgtcatatggagtacaggatgtttgatatcggcgttaatttgaccagtagccaatttgcgaaagaccgtgatgatgttgtagcgtgcgcttttgacgcgggagttaatgggctactcatcaccggcactaacctgcgtgaaagccagcaggcgcaaaagctggcgcgtcagtatagctcctgttggagtacggcgggcgtacatcctcacgacagcagccagtggcaagctgcgactgaagaagcgattattgagctggccgcgcagccagaagtggtggcgattggtgaatgtggtctcgactttaaccgcaactttagcacgccggaagagcaggaacgcgcttttgttgcccagctacgcattgccgcagatttaaacatgccggtatttatgcactgtcgcgatgcccacgagcggtttatgacattgctggagccgtggctggataaactgcctggtgcggttcttcattgctttaccggcacacgcgaagagatgcaggcgtgcgtggcgcatggaatttatatcggcattaccggttgggtttgcgatgaacgacgcggactggagctgcgggaacttttgccgttgattccggcggaaaaattactgatcgaaactgatgcgccgtatctgctccctcgcgatctcacgccaaagccaagttcccggcgcaacgagccagcccatctgccccatattttgcaacgtattgcgcactggcgtggagaagatgccgcatggctggctgccaccacggatgctaatgtcaaaacactgtttgggattgcgttttaaagtttgcggaactcggtattcttcacactgtgcttaatctctttattaataagattaagcaatagcatggagcgagcctcaccatcgggttcggtgaaaatggcctgaaagccttcgaacgcgccttcggtaataatcaccttatcacccggataaggggttgccggatcgacaatgtctttcggtttatatacgcttagctgatgaataaccgcgcttgggactatcgctgggctcgcgccaaagcgcacgaagtggctgacaccgcgggtcgcgttgatagtcgtggtatgaatcacttctgggtcaaattccacaaacaggtagttggggaacaatggctcactgactgcagtacgttttccacgcacgattttttccagggtgatcatcggtgccaggcaattcacagcctgtctttcgaggtgttcctgggcacgttgaagttgcccgcgcttgcagtacagtaaataccaggattgcataatgactcttatccgtttaatcggggcgcaaggatagcaaaagctttacgctaagttaattatattccccggtttgcgttataccgtcagagttcacgctaatttaacaaatttacagcatcgcaaagatgaacgccgtataatgggcgcagattaagaggctacaatggacgccatgaaatataacgatttacgcgacttcttgacgctgcttgaacagcagggtgagctaaaacgtatcacgctcccggtggatccgcatctggaaatcactgaaattgctgaccgcactttgcgtgccggtgggcctgcgctgttgttcgaaaaccctaaaggctacagtatgccggtgctgtgcaacctgttcggtacgccaaagcgcgtggcgatgggcatggggcaggaagatgttagcgcgctgcgtgaagttggtaaattattggcgtttctgaaagagccggagccgccaaaaggtttccgcgacctgtttgataaactgccgcagtttaagcaagtattgaacatgccgacaaagcggctgcgtggtgcgccctgccaacaaaaaatcgtctctggcgatgacgtcgatctcaatcgcattcccattatgacctgctggccggaagatgccgcgccgctgattacctgggggctgacagtgacgcgcggcccacataaagagcggcagaatctgggcatttatcgccagcagctgattggtaaaaacaaactgattatgcgctggctgagccatcgcggcggcgcgctggattatcaggagtggtgtgcggcgcatccgggcgaacgtttcccggtttctgtggcgctgggtgccgatcccgccacgattctcggtgcagtcactcccgttccggatacgcttagtgagtatgcgtttgccggattgctacgtggcaccaagaccgaagtggtgaagtgtatctccaatgatcttgaagtgcccgccagtgcggagattgtgctggaagggtatatcgaacaaggcgaaactgcgccggaagggccgtatggcgaccacaccggttactataatgaagtcgatagtttcccggtatttaccgtgacgcatattacccagcgtgaagatgcgatttaccattccacctataccgggcgtccgccagatgagcccgcggtgctgggtgtcgcactgaacgaagtgtttgtgccgattctgcaaaaacagttcccggaaattgtcgatttttacctgccgccggaaggctgctcttatcgcctggcggtagtgacaatcaaaaaacagtacgccggacacgcgaagcgcgtcatgatgggcgtctggagcttcttacgccagtttatgtacactaaatttgtgatcgtttgcgatgatgacgttaacgcacgcgactggaacgatgtgatttgggcgattaccacccgtatggacccggcgcgggatactgttctggtagaaaatacgcctattgattatctggattttgccagccctgtctccgggctgggtagtaaaatggggctggatgccacgaataaatggccgggggaaacccagcgtgaatggggacgtcccatcaaaaaagatccagatgttgtcgcgcatattgacgccatctgggatgaactggctatttttaacaacggtaaaagcgcctgatgcgcgtttgttttgccctatttatcgatccgacagagaaagcgcatgacaaccttaagctgtaaagtgaccagcgtagaagctatcacggataccgtatatcgtgtccgcatcgtgccagacgcggccttttcttttcgtgctggtcagtatttgatggtagtgatggatgagcgcgacaaacgtccgttcagtatggctagcacgccggatgaaaaagggtttatcgagctgcatattggcgcttctgaaatcaacctttacgcgaaagcagtcatggaccgcatcctcaaagatcatcaaatcgtggtcgacattccccacggagaagcgtggctgcgcgatgatgaagagcgtccgatgattttgattgcgggcggcaccgggttctcttatgcccgcagcattttgctgacagcgttggcgcgtaacccaaaccgtgatatcaccatttactggggcgggcgtgaagagcagcatctgtatgatctctgcgagcttgaggcgcttagcttgaagcatcctggtctgcaagtggtgccggtggttgaacaaccggaagcgggctggcgtgggcgtactggcaccgtgttaacggcggtattgcaggatcacggtacgctggcagagcatgatatctatattgccggacgttttgagatggcgaaaattgcccgcgatctgttttgcagtgagcgtaatgcgcgggaagatcgcctgtttggcgatgcgtttgcatttatctgagatataaaaaaacccgcccctgacaggcgggaagaacggcaactaaactgttattcagtggcatttagatctatgacgtatctggcaaaccatgcccgatgcgacgctgtcgcgtcttatcgtgcctacaaatagtccgaaccgtaggccggataaggcgtttacgccgcatccggcaattggtgcatgatgcctgatgcgacgctgtcgcgtcttatcgtgcctacaaatagtccgaaccgtaggccggataaggcgtttacgccgcatccggcaattggtgcatgatgcctgatgcgacgctggcgcgtcttatcaggcctacattggtgccggatcggtagaccggataaggcgttcacgccgcatccggcaagtggttaaacccgctcaaacaccgtcgcaataccctgacccagaccgatacacatcgtcgccagaccaaactgaacgtctttgcgttccatcagattcagcagcgtggtgctgatacgcgcaccggaacaacccagcggatgacccagcgcgatcgcgccaccgttgaggttgatcttctcgtcaatctgctcaattagtcccagatctttaatacatggcaggatctgcgcggcaaaggcttcgttcatttcaaacacgccgatatcgctggcagaaagccccgcttttttcagcgccagtttgctggccggaaccgggccgtaacccataatgcttgggtcacaaccaacgaccgccatgctacgcacacgagcgcgcggcttaagacctaattcatgggcgcggctttcactcatcaccagcatggcagctgcgccatcggaaagtgcagaagatgtgcccgccgttaccataccgtttactggatcaaacgccggacgcagcgtggcgagggcttccacggtggtttccgggcgaatcacttcgtcgtaattaaactgcttcaggacgccgtcggcatcgtgaccaccggtcgggatgatttcatttttaaatgcggcgctctgcgtggcggcccaggcgcgggcgtgactccgcgcggcaaaggcatcctgcatttcacggctgataccgtgcatacgcgccagcatttctgccgttaagcccatcatgcccgccgctttggcgacattgcggctcaggccggggtgaaaatcgacgccgtgactcatcggcacatggcccatatgctccacgccgccaaccagacatgcctgcgcatcgccagtcatgatcattcgtgctgcgtcatgcagtgcctgcatggaactaccacacaagcgattaacggtaaccgccgggacagagtgtggtacttctgccagcagcgccgcgttacgggcgatattaaaaccctgctccagcgtctgctgcacacaaccccagtaaatatcgtcgagggccgccgcttccagcgccgggttacgcgccagcaggctacgcattaaatgagcggagagatcttctgcacgcacgttacgaaaagcaccgcccttgctacggcccatcggggtgcgaattgcatcgacaatgacaacctgttccattgtgactccttaagccgttttcaggtcgccaaccggacgggctggctcaaccggaggatagtacggttcgttatgacgcgctttattacgcagaccttccggcacttcatacagcgggccgaggtgctgatattgctgtgccatatcgaggtattttgcgctaccgagggtgtccagccagcggaacgcgccgccgtggaacggagggaagcccaggccgtagaccagcgccatatccgcttccgccggagtggcgataatgccttcctccagacagcgcaccacttcgttgaccatcgggatcatcatgcgggcgataatctcttcttcgctgaagtcgcgcttcggctggctcacttctgccagcaggtcttcaacggcggcgtcttcttctttcttcggcttacctttgctgtcttctttataacgccagaaaccgaggccgttcttctgaccaaagcggttggcatcaaacagcgcgtcgatggcatcgcggtaatctttctgcatccgctgcgggaagcctgctgccatgacagcctgagcgtgatgcgcggtatcaatgcccacaacgtccagcagatatgccgggcccatcggccagccaaactgtttttccatcactttgtcgatcttgcggaaatccgcgccgtcgcgcagcagctggctgaaaccggcgaaatacgggaacagcacgcggttaacaaagaagccggggcagtcgttaaccacaatcggcgtcttgcccatcttgctcgcccaggcgacaactttcgcgatggtttcgtcggagcttttctcgccgcgaataatttctaccaacggcattcggtggaccgggttaaagaagtgcatcccgcagaagttttccgggcgttccagcgcgttggccagttcgctgataggaatggtactagtgttagacgccagcacggtatcctggcgtactttttgttcggtttctgccagtacggcttttttcactttcgggttttcaacaaccgcttctaccacaatatccacgcggtcaaatccggcgtagtcgagcgttgggtggattgtggagatcacgccagccagtttcagaccatcgatcttgccgcgctcaagctgcttgttcagcagtttcgcggcttcggtcatgccgagggttaagctcttgtcgttgatatctttcatgacaaccggcacgcctttccacgcagactggtaagcgatgccgccgcccataatgcctgcacccagcaccgcggcctgtttcggggtttcaacgtctttggtgagtttcttcgctttgccttttacatattgatcgttaaggaaaatgccgaccagtgcgcgggcttcgttggtatgcgccagcgggacaaaacttttgttttccaggtttaaggcttcttcacgaccaaaacgggccgcagcttcaatggtttttactgcggtgatgggggccggataatgtttccccgctgtttgtgcgaccatccctttagcgatggtgaagctcatggtggcttcaatcttgctcagttttagtggttccagcttcggctgacgttttgctttccagtcgaggtcgccgttaatggcctggcgtaaaaccgcctttgcgccttcaaccagtttttctgctttgactacgccatccaccagaccgattttcagcgcctgatccgcgccgacatctttaccggcggcaatgatttccagcgcactgtcagcgcccagcatacgtggcatacgtacagaaccgccaaagccaggcatgatgcccagtttggtttccggcagaccgatgcgcagatccggcgtcgccagacgataatcggtcgccagcacgcattcgcagccaccgcccagcgcatagccattgacggcagcaatggtcggcaccggcagatcttccaggcgattaaacacgctattggcaaagtgcagccactgacttaactgttcttcaggaacgaggaacagggacaaaaattcggtgatatcagcaccgacgataaaggctgctttgttgctacgcagcagcagcccttttagatcactttgctgttccagcacgccgatggcctcgccgaggctggcgacggtcgcagtgtcgagtttattaacactacctggggcatcaaataccagttcggcaatgccatcttccagccagtcaaggtacagggtgtcgcctttgtaaagcatgtcagtctcctgaatccgcaaggtgatctggtcgtaccagatgagtcgaagtgtgtattttgtgttaaaaatatgcaaacaaaagattaaagaaatgccgatctgatcacgctcggcagaaatcacgctctggatgaacgatgtgctaagatgcggagacttaaggtcaaaaaaacagaagggtaaaaaatggaaagtctggccagcctctataaaaatcatatagctaccttacaagaacggactcgcgatgcgctggcgcgcttcaagctggatgcgttacttattcactccggcgagctgttcaatgtttttctcgacgatcatccctatccgtttaaagtgaacccgcaattcaaagcgtgggtgccggtaactcaggtgccaaactgctggttgctggtggatggcgtgaacaagccgaaactgtggttctatctgccggttgattactggcacaacgtcgaaccgctgccgacctctttctggactgaagatgtggaagtgatcgcgctgccgaaagccgatggcattggtagcctgctgcctgctgcgcgcggcaatatcggttatatcggtccggtgccggaacgtgcgctgcaactgggtattgaggccagcaacatcaacccgaaaggggttatcgactacctgcattactatcgctccttcaaaactgagtacgaactggcctgtatgcgtgaagcgcagaaaatggcggtcaacggtcaccgcgcggcagaagaagcgttccgttctggcatgagcgagttcgatatcaacattgcctatctgaccgcgaccggtcatcgtgataccgacgtaccttacagcaacattgtggcgcttaacgaacacgctgcggtactgcattacaccaaactggaccatcaggcaccggaagagatgcgcagcttcctgctggatgccggggcagaatataacggctatgcggctgacctgacccgtacctggagcgcaaaaagtgacaacgactacgcgcagctggtgaaggacgttaatgatgaacaactggcgctgatcgccaccatgaaagcaggcgtcagctatgtggattaccacatccagttccatcagcgcatcgccaaactgctgcgtaaacatcaaatcatcaccgatatgagtgaagaagcgatggtcgaaaacgatcttaccgggccgtttatgccgcatggtatcggccatccgctgggcctgcaggtgcatgacgtcgctggttttatgcaggatgatagcggtacgcacctcgcggcaccggcaaaatatccgtacctgcgctgcacccgtattctccagccgggcatggtgttaaccatcgaaccgggtatctacttcatcgaaagcctactggcaccgtggcgtgaagggcagttcagcaagcacttcaactggcagaaaattgaagcactgaaaccgttcggcggcattcgtatcgaagacaacgtggtgatccacgaaaacaacgtggaaaacatgacccgggatctgaaactggcgtgatggaaagctggttaattcctgcggcaccggtcacggtcgttgaagagatcaaaaagagccgcttcataacgatgttggcgcataccgatggcgttgaggcggcgaaagcgtttgttgaaagcgtgcgggcagaacaccccgatgcccggcaccattgcgtggcgtgggtcgcgggtgcgccggatgattctcaacagctgggtttctctgacgacggggagccggcgggaacggcaggtaaaccgatgctcgcccagctaatgggcagcggcgtcggggaaattaccgctgtggtagtgcgctactacggcggcatattgcttggcaccggtgggttagtgaaagcgtatggcggcggcgtgaatcaggcgctgcgccagctaacgacccaacgcaagacgccattaaccgaatatactttgcaatgtgaatatcatcagttaaccggcattgaagcgttgctggggcagtgtgacggcaaaattatcaacagtgattatcaggcattcgttctgctgcgggtggcgcttccggcggcgaaagtggctgaattttccgcaaagctggcggattttagccgtggtagtttgcaattgttagcgattgaagaataatccccacttcgttttgcagaactaaggaagcggcagagatgcattttcgcgccattacccgaatcgttggactactggtcatcttatttagtgggaccatgattatccctgggctggtagcactcatctaccgggatggagcgggccgcgcttttacccagaccttttttgtcgccctcgccattggctctatgctgtggtggccgaaccgcaaagagaaaggcgaacttaaatcccgtgaggggtttctgatagtggtgctgttctggaccgtgctgggtagcgtcggtgcgctcccttttatcttcagcgaaagcccgaacctcacgattaccgatgcgttttttgaatctttctctggcctgaccactacgggagccactacgctggtggggctggatagcctccctcacgccatcctcttttatcgccagatgctgcaatggtttggcgggatggggatcatcgtgttggcggttgcgatactgcctatcctcggcgtgggtgggatgcagctctatcgcgcagaaatgcccggcccgctgaaagataacaaaatgcgcccgcgaattgcggaaacggcgaaaaccctgtggttgatttatgtcttgctgaccgtcgcctgtgcgctggcgttgtggtttgccggaatggatgcctttgatgccatcggccatagctttgcgactatcgctattggcggcttcagcacacatgatgccagtatcggttatttcgatagcccgactattaacactatcattgctatcttcctgctgatctccggctgtaactacggtctgcactttagtctgttaagtgggcgtagtctgaaggtttattggcgcgatccggaatttcgcatgtttatcggcgtacagtttacgctggtggttatttgtaccctcgtactgtggtttcataatgtctacagtagcgcgctgatgacaattaaccaggcgtttttccaggtggtgagcatggcgacaaccgccgggtttacaactgacagcattgcccgctggccgctctttttgccggtactgcttttatgtagtgcctttatcggcggttgcgccgggagtacgggcggtggcctgaaggtgatccgcatcctgctgctgtttaagcaggggaaccgtgagctgaaacgactggtgcatccgaacgccgtctatagcattaagctggggaatcgcgcactgccggaacgtatcctcgaagccgtttggggatttttctccgcctatgcattggtgtttattgtcagtatgctggcgattatcgccacgggcgtggatgacttttctgcctttgcgagcgttgttgcgacattgaataacctggggccagggcttggcgtggttgctgataactttaccagtatgaacccggtggctaaatggatcctgattgccaacatgctgtttggtcgtctcgaggtctttacattgctggtgctctttaccccgactttctggcgtgaatgatggagtaatacgtgaaaacattaattcttttcagtacaagggacggacaaacgcgcgagattgcctcctacctggctagcgaactgaaagaactggggatccaggcggatgtcgccaatgtgcaccgcattgaagaaccacagtgggaaaactatgaccgtgtggtcattggtgcttctattcgctatggtcactaccatagtgcgttccaggaatttgtcaaaaaacatgcgacgcggctgaatagcatgccgagcgccttttactccgtgaatctggtggcgcgcaaaccggagaagcgtactccacagaccaacagctacgcgcgcaagtttctgatgaacagccaatggcgtcccgatcgctgcgcggtcattgccggggcgctgcgttacccacgttatcgctggtacgaccgttttatgatcaagctgattatgaagatgagtggcggtgaaacggatacgcgcaaagaagttgtctataccgattgggagcaggtggcgaatttcgcccgagaaatcgcccatttaaccgacaaaccgacgctgaaataagcataaagaataaaaaatgcgcggtcagaaaattattttaaatttcctcttgtcaggccggaataactccctataatgcgccaccactgacacggaacaacggcaaacacgccgccgggtcagcggggttctcctgagaactccggcagagaaagcaaaaataaatgcttgactctgtagcgggaaggcgtattatgcacaccccgcgccgctgagaaaaagcgaagcggcactgctctttaacaatttatcagacaatctgtgtgggcactcgaagatacggattcttaacgtcgcaagacgaaaaatgaataccaagtctcaagagtgaacacgtaattcattacgaagtttaattctttgagcgtcaaacttttaaattgaagagtttgatcatggctcagattgaacgctggcggcaggcctaacacatgcaagtcgaacggtaacaggaagaagcttgcttctttgctgacgagtggcggacgggtgagtaatgtctgggaaactgcctgatggagggggataactactggaaacggtagctaataccgcataacgtcgcaagaccaaagaggggtaccttcgggcctcttgccatcggatgtgcccagatgggattagctagtaggtggggtaacggctcacctaggcgacgatccctagctggtctgagaggatgaccagccacactggaactgagacacggtccagactcctacgggaggcagcagtggggaatattgcacaatgggcgcaagcctgatgcagccatgccgcgtgtatgaagaaggccttcgggttgtaaagtactttcagcggggaggaagggagtaaagttaatacctttgctcattgacgttacccgcagaagaagcaccggctaactccgtgccagcagccgcggtaatacggagggtgcaagcgttaatcggaattactgggcgtaaagcgcacgcaggcggtttgttaagtcagatgtgaaatccccgggctcaacctgggaactgcatctgatactggcaagcttgagtctcgtagaggggggtagaattccaggtgtagcggtgaaatgcgtagagatctggaggaataccggtggcgaaggcggccccctggacgaagactgacgctcaggtgcgaaagcgtggggagcaaacaggattagataccctggtagtccacgccgtaaacgatgtcgacttggaggttgtgcccttgaggcgtggcttccggagctaacgcgttaagtcgaccgcctggggagtacggccgcaaggttaaaactcaaatgaattgacgggggcccgcacaagcggtggagcatgtggtttaattcgatgcaacgcgaagaaccttacctggtcttgacatccacggaagttttcagagatgagaatgtgccttcgggaaccgtgagacaggtgctgcatggctgtcgtcagctcgtgttgtgaaatgttgggttaagtcccgcaacgagcgcaacccttatcctttgttgccagcggtccggccgggaactcaaaggagactgccagtgataaactggaggaaggtggggatgacgtcaagtcatcatggcccttacgaccagggctacacacgtgctacaatggcgcatacaaagagaagcgacctcgcgagagcaagcggacctcataaagtgcgtcgtagtccggattggagtctgcaactcgactccatgaagtcggaatcgctagtaatcgtggatcagaatgccacggtgaatacgttcccgggccttgtacacaccgcccgtcacaccatgggagtgggttgcaaaagaagtaggtagcttaaccttcgggagggcgcttaccactttgtgattcatgactggggtgaagtcgtaacaaggtaaccgtaggggaacctgcggttggatcacctccttaccttaaagaagcgttctttgaagtgctcacacagattgtctgatgaaaatgagcagtaaaacctctacaggcttgtagctcaggtggttagagcgcacccctgataagggtgaggtcggtggttcaagtccactcaggcctaccaaatttgcacggcaaatttgaagaggttttaactacatgttatggggctatagctcagctgggagagcgcctgctttgcacgcaggaggtctgcggttcgatcccgcatagctccaccatctctgtagtgattaaataaaaaatacttcagagtgtacctgcaaaggttcactgcgaagttttgctctttaaaaatctggatcaagctgaaaattgaaacactgaacaacgaaagttgttcgtgagtctctcaaattttcgcaacacgatgatgaatcgaaagaaacatcttcgggttgtgaggttaagcgactaagcgtacacggtggatgccctggcagtcagaggcgatgaaggacgtgctaatctgcgataagcgtcggtaaggtgatatgaaccgttataaccggcgatttccgaatggggaaacccagtgtgtttcgacacactatcattaactgaatccataggttaatgaggcgaaccgggggaactgaaacatctaagtaccccgaggaaaagaaatcaaccgagattcccccagtagcggcgagcgaacggggagcagcccagagcctgaatcagtgtgtgtgttagtggaagcgtctggaaaggcgtgcgatacagggtgacagccccgtacacaaaaatgcacatgctgtgagctcgatgagtagggcgggacacgtggtatcctgtctgaatatggggggaccatcctccaaggctaaatactcctgactgaccgatagtgaaccagtaccgtgagggaaaggcgaaaagaaccccggcgaggggagtgaaaaagaacctgaaaccgtgtacgtacaagcagtgggagcacgcttaggcgtgtgactgcgtaccttttgtataatgggtcagcgacttatattctgtagcaaggttaaccgaataggggagccgaagggaaaccgagtcttaactgggcgttaagttgcagggtatagacccgaaacccggtgatctagccatgggcaggttgaaggttgggtaacactaactggaggaccgaaccgactaatgttgaaaaattagcggatgacttgtggctgggggtgaaaggccaatcaaaccgggagatagctggttctccccgaaagctatttaggtagcgcctcgtgaattcatctccgggggtagagcactgtttcggcaagggggtcatcccgacttaccaacccgatgcaaactgcgaataccggagaatgttatcacgggagacacacggcgggtgctaacgtccgtcgtgaagagggaaacaacccagaccgccagctaaggtcccaaagtcatggttaagtgggaaacgatgtgggaaggcccagacagccaggatgttggcttagaagcagccatcatttaaagaaagcgtaatagctcactggtcgagtcggcctgcgcggaagatgtaacggggctaaaccatgcaccgaagctgcggcagcgacactatgtgttgttgggtaggggagcgttctgtaagcctgtgaaggtgtgctgtgaggcatgctggaggtatcagaagtgcgaatgctgacataagtaacgataaagcgggtgaaaagcccgctcgccggaagaccaagggttcctgtccaacgttaatcggggcagggtgagtcgacccctaaggcgaggccgaaaggcgtagtcgatgggaaacaggttaatattcctgtacttggtgttactgcgaaggggggacggagaaggctatgttggccgggcgacggttgtcccggtttaagcgtgtaggctggttttccaggcaaatccggaaaatcaaggctgaggcgtgatgacgaggcactacggtgctgaagcaacaaatgccctgcttccaggaaaagcctctaagcatcaggtaacatcaaatcgtaccccaaaccgacacaggtggtcaggtagagaataccaaggcgcttgagagaactcgggtgaaggaactaggcaaaatggtgccgtaacttcgggagaaggcacgctgatatgtaggtgaagcgacttgctcgtggagctgaaatcagtcgaagataccagctggctgcaactgtttattaaaaacacagcactgtgcaaacacgaaagtggacgtatacggtgtgacgcctgcccggtgccggaaggttaattgatggggttagccgcaaggcgaagctcttgatcgaagccccggtaaacggcggccgtaactataacggtcctaaggtagcgaaattccttgtcgggtaagttccgacctgcacgaatggcgtaatgatggccaggctgtctccacccgagactcagtgaaattgaactcgctgtgaagatgcagtgtacccgcggcaagacggaaagaccccgtgaacctttactatagcttgacactgaacattgagccttgatgtgtaggataggtgggaggctttgaagtgtggacgccagtctgcatggagccgaccttgaaataccaccctttaatgtttgatgttctaacgttgacccgtaatccgggttgcggacagtgtctggtgggtagtttgactggggcggtctcctcctaaagagtaacggaggagcacgaaggttggctaatcctggtcggacatcaggaggttagtgcaatggcataagccagcttgactgcgagcgtgacggcgcgagcaggtgcgaaagcaggtcatagtgatccggtggttctgaatggaagggccatcgctcaacggataaaaggtactccggggataacaggctgataccgcccaagagttcatatcgacggcggtgtttggcacctcgatgtcggctcatcacatcctggggctgaagtaggtcccaagggtatggctgttcgccatttaaagtggtacgcgagctgggtttagaacgtcgtgagacagttcggtccctatctgccgtgggcgctggagaactgaggggggctgctcctagtacgagaggaccggagtggacgcatcactggtgttcgggttgtcatgccaatggcactgcccggtagctaaatgcggaagagataagtgctgaaagcatctaagcacgaaacttgccccgagatgagttctccctgactccttgagagtcctgaaggaacgttgaagacgacgacgttgataggccgggtgtgtaagcgcagcgatgcgttgagctaaccggtactaatgaaccgtgaggcttaaccttacaacgccgaaggtgttttggcggattgagagaagattttcagcctgatacagattaaatcagaacgcagaagcggtctgataaaacagaatttgcctggcggcagtagcgcggtggtcccacctgaccccatgccgaactcagaagtgaaacgccgtagcgccgatggtagtgtggggtctcctcatgcgagagtagggaactgccaggcatcaaataaaacgaaaggctcagtcggaagactgggcctttcgttttatctgttgtttgtcggtgaacgctctcctgagtaggacaaatccgccgggagcggatttgaacgttgcgaagcaacggcccggagggtggcgggcaggacgcccgccataaactgccaggcatcaaattaagcagaaggccatcctgacggatggcctttttgcattggcgcagaaaaaaatgccggatgcgacgctggcgcgtcttatccagcctactcttgcttatccgttctgcttttgcatccactccaccacaaaatcagccagcccctcaacatcattaatatccagtaatgcgacatcaagattaagcggcacatcactggctacagcaataacatgcctgtctatcactaattcttcaggtcgatgtccggctccatcgcgaaacagcacaatctttgcgatctcttcatgcttaaacccttcgaccagaatcaaatccagcttactggtatccattcgacttgcgagaaactgtagatccagctcttcttcgtctggtgtttccgtcatcaaggcccatcgttgctggctggcaacgatggtttgtaccgcgccagccttgcgcagctcatagctatctttgcctggcttatcaacatccatatcatggtgcgtatgcttaatcagccctggacggatccctctggcgcataatgccgggatcagttttttcaaaagcgtagtttttccggtaccactccacgcggcaaaggcgagtaacggtatcatcgtttttcctgccatcgggcaagctcctctggcgtattcacgttaacaaatgcatctttatgatcgctgaaatcaaccgcatgaccgccagccagacgcataaataccattacccggcgttctcctgcttgcagatattccagtaataaaggctcaatagcgcggtttaccagagcaatagtcgggtgatcgcgttcaccgtcatggacccacacgacaggcgcatctttgcgctgatgattaagcctggctgctaaatcagggggaatgtaaggcgtatcgcacgggcaaaacaaaaaccactcaccagcttcctgctgcattacactaagcattcctgccagagggcctgggtaatccgccagactatcttcaatcactttcagaccgcttgcctgatagatttcctgatgacgattagcattaaccacgacgtgagagagctgcgtcataagcgcgtcagcgacatgttgccataatggtttgccgtttaattcaagcaatcctttatctacgccgcccattcgtctggctttaccgcctgccagcacaacgcctgttatcgtcgtcatcagattcaccgatatcgcctcttttattgtgggattgaccctgctaacgtgtctgtctcaagagtaaggagcatcactatgaaatgtaaacgtctgaatgaagttattgaactcctccagccagcctggcaaaaagagccagaccttaacctgctgcaatttttgcagaaactggcgaaagagagtggttttgacggcgaactggcggatttgacggatgacattctgatctatcacctgaaaatgcgtgattccgcgaaagatgcggtgatcccgggtttgcagaaagattatgaagaagacttcaaaacggcgctgttacgcgctcgcggcgtaattaaagagtaaaagcttgtaagcggcgccaccaaaatcatcgtgaaatgatatccttcgtcattcgtaatgttttccggatgatgggatgaataacagcgcttttactttccagacactacacccggataccatcatggacgctctgtttgagcatgggatccgggtggattccggtcttaccccgcttaacagctatgaaaaccgtgtctatcaatttcaggacgaagatcgtcgacgttttgtcgtcaaattttatcgccctgaacgttggacagccgatcaaatcctcgaagaacatcaatttgcgttgcagctggtaaatgatgaagttccggtcgcagcacctgtggcctttaacggtcagactttattgaatcatcagggattttatttcgctgtttttccaagcgtcggtggtcgccagttcgaagctgataatatcgatcagatggaagcggttgggcgttatttagggcgtatgcaccagacggggcgcaaacagctttttatccatcgcccgaccatcggtttgaacgaatatctcattgagccacgcaagctgtttgaggacgctacactgataccttccgggttgaaagcggcattcctgaaagcgacagatgagctgattgccgccgttacagcacactggcgggaagatttcaccgttctgcggctacatggagactgccacgccgggaatattctctggcgcgatggtccaatgtttgttgatctggatgatgcacgtaatggtccagccgttcaggatttgtggatgttgctcaatggcgataaagccgagcagcggatgcaactggaaactattattgaagcttatgaagaatttagcgagttcgacaccgctgaaatcggactgattgaacctttacgcgccatgcgtttggtttattatcttgcctggctaatgcggcgttgggctgatcccgcgttcccgaaaaatttcccgtggttaaccggggaagattactggctgcgacagacggcgacttttatagaacaggcaaaagttctacaagaaccccctttgcaattaacacctatgtattaatcggagagagtagatcatgaaaaagatttggctggcgctggctggtttagttttagcgtttagcgcaagcgcggcgcagtatgaagatggtaaacagtacactaccctggaaaaaccggtagctggcgcgccgcaagtgctggagtttttctctttcttctgcccgcactgctatcagtttgaagaagttctgcatatttctgataatgtgaagaaaaaactgccggaaggcgtgaagatgactaaataccacgtcaacttcatgggtggtgacctgggcaaagatctgactcaggcatgggctgtggcgatggcgctgggcgtggaagacaaagtgactgttccgctgtttgaaggcgtacagaaaacccagaccattcgttctgcttctgatatccgcgatgtatttatcaacgcaggtattaaaggtgaagagtacgacgcggcgtggaacagcttcgtggtgaaatctctggtcgctcagcaggaaaaagctgcagctgacgtgcaattgcgtggcgttccggcgatgtttgttaacggtaaatatcagctgaatccgcagggtatggataccagcaatatggatgtttttgttcagcagtatgctgatacagtgaaatatctgtccgagaaaaaataattcaatgtaaattacataaagcccgtgaatattcacgggctttttttattatttaataaatataaatacattctgataatgcatcctgccgctggacattatttcagcataagtggatattcaaagttttgctgttttatcagggaatatttatatgatacgtaagagtgctacaggtgttattgttgcgttagccgtaatctggggtggtggcacatggtacacaggtacgcaaattcagcctggtgtcgaaaaatttattaaagattttaacgatgctaaaaagaaaggtgaacatgcctacgatatgacgttaagttatcaaaattttgacaaaggcttttttaattcccgttttcaaatgcaaatgacattcgataacggtgcacccgatctcaatatcaagccaggccagaaagttgtatttgatgtggatgttgagcacggtccgttgcccatcacaatgttaatgcatggtaatgtcatcccagcactggcagcggcaaaagtgaacttagtgaataatgaactgacacaaccgctatttatcgccgcgaaaaataaaagccccgtggaagcgacattgcgattcgcgtttggtggcagtttctctacgacattagatgttgcccctgcagagtatggaaagttttcttttggtgagggccagtttacttttaatggtgatggtagtagtttgtctaacctggatattgaaggcaaagtcgaagatattgttctgcaattaagtccaatgaacaaagtaacggcaaaaagttttaccattgattctctggcgcgattagaagaaaagaaatttccggttggtgaaagcgagagcaaatttaatcagattaacattatcaatcacggggaagacgttgcccaaatcgatgctttcgttgcaaaaaccaggctggatcgcgttaaagacaaagattatatcaatgtcaatctcacctacgaacttgataagttaacaaaagggaatcagcaactcggtagtggtgagtggagtttgattgctgaatctattgatcccagtgcagtgcgccaatttatcatccagtataacattgcgatgcagaagcagcttgctgcacaccctgagttagcaaacgatgaagttgctctgcaagaagtgaatgctgcattgttcaaagagtatttaccgttattacaaaaaagtgagccgaccattaaacaaccggtaagatggaagaacgcactcggcgaactaaatgccaatctggatatcagtattgccgacccagccaaatctagtagttccacaaacaaagatatcaaaagcctcaattttgatgtgaagttaccgcttaatgtcgtcacagaaaccgcaaaacagcttaatttatctgaaggaatggatgcggaaaaagcgcaaaagcaggctgataaacaaatcagcgggatgatgacattaggtcagatgtttcagttaatcacgattgacaacaataccgccagcctgcagctgcgttatacaccgggtaaagttgtttttaacggacaggagatgagcgaagaagaatttatgtctcgtgccggacgttttgttcattaaaatactcactcgcctctgctcattcagaggcgagtaaaacttacttattctgacgctgactactcatgagagacgtcagaagccggtctttttcctgccacaaactgttcagccattgctgaaaatggcgcttaaagcttttgtcattgatgtagtcgccatgtaactcatcggcaataggctgtaaatccacatgtacgacaatccgcgtcagtttaccgcttaacatatcgaagaacggctgacggttattgtccggataacacagcgtaacattaagcagtttatcgaattgtttacccagtacatttagcgccatcgcaatgcctgccgcctttggtggcaacaagttttgaaaagtggagtgggtttgctgatgtttttcttgcgtgaaacgggagccttcaacgaaattgacaatggtggtgggatgcaggcgaaacttttcacaagaacgccgagtggtttcaacatctttaccacgtcgctccggatgacgtaataaataagcgcgggaataacgcttcataaacggcatatccaggctccagcacgccaggccaagaaatggcacccaggccagctgttgcttgaggaaatatttattcatcggaatgtgcttacgaaacagcacgcacagtacgacaatatctgcccaactacggtggttacaaataagcagataccagttcttcttacttaacccttccagcccgtgaacttcccattgaaggtgtgggttcagatgcagtaataccgccagaccttcacaccagcaatacatcataaaatcacaaaaacggctaacctttcgccaaatgactggcacaggtagcaatagttttacaatcccggcaatgatgatcgggacggaacaaaaaatagtgaccaaaatggtcaatacgatactcagcaaaagggttatcgcagcgagtattctcgtcataatgaatttattcaaaaggttagccatagacagtgcgctaaagaagcgcaaggcgcagattttagcagaaaacgacccaaataacggatgatccttaaggagaaaaataattcatatctatccacattagaaaaaatcccattatctcaattattagggatggatttatttttaactgcatgaaaaacaaagacaaacatcatgctgtaaaaagcatgataataaattaaaagcgatgtaaataatttatgcacaaagttatccacatgacgatttgcgagcgatccagaagatctacaaaagattttcacgaaaagcggtgaaaaactcatgttttcatcctgtctgtggcatcctttacccataatctgataaacaggcacggacattatggttcagatcccccaaaatccacttatccttgtagatggtagttcttatctttatcgcgcatatcacgcgtttcccccgctgactaacagcgcaggcgagccgaccggtgcgatgtatggtgtcctcaacatgctgcgcagtctgatcatgcaatataaaccgacgcatgcagcggtggtctttgacgccaagggaaaaacctttcgtgatgaactgtttgaacattacaaaagtcatcgcccgccaatgccggacgatctgcgtgcacaaatcgaacccttgcacgcgatggttaaagcgatgggactgccgctgctggcggtttctggcgtagaagcggacgacgttatcggtactctggcgcgcgaagccgaaaaagccgggcgtccggtgctgatcagcactggcgataaagatatggcgcagctggtgacgccaaatattacgcttatcaataccatgacgaataccatcctcggaccggaagaggtggtgaataagtacggcgtgccgccagaactgatcatcgatttcctggcgctgatgggtgactcctctgataacattcctggcgtaccgggcgtcggtgaaaaaaccgcgcaggcattgctgcaaggtcttggcggactggatacgctgtatgccgagccagaaaaaattgctgggttgagcttccgtggcgcgaaaacaatggcagcgaagctcgagcaaaacaaagaagttgcttatctcagttaccagctggcgacgattaaaaccgacgttgaactggagctgacctgtgaacaactggaagtgcagcaaccggcagcggaagagttgttggggctgttcaaaaagtatgagttcaaacgctggactgctgatgtcgaagcgggcaaatggttacaggccaaaggggcaaaaccagccgcgaagccacaggaaaccagtgttgcagacgaagcaccagaagtgacggcaacggtgatttcttatgacaactacgtcaccatccttgatgaagaaacactgaaagcgtggattgcgaagctggaaaaagcgccggtatttgcatttgataccgaaaccgacagccttgataacatctctgctaacctggtcgggctttcttttgctatcgagccaggcgtagcggcatatattccggttgctcatgattatcttgatgcgcccgatcaaatctctcgcgagcgtgcactcgagttgctaaaaccgctgctggaagatgaaaaggcgctgaaggtcgggcaaaacctgaaatacgatcgcggtattctggcgaactacggcattgaactgcgtgggattgcgtttgataccatgctggagtcctacattctcaatagcgttgccgggcgtcacgatatggacagcctcgcggaacgttggttgaagcacaaaaccatcacttttgaagagattgctggtaaaggcaaaaatcaactgacctttaaccagattgccctcgaagaagccggacgttacgccgccgaagatgcagatgtcaccttgcagttgcatctgaaaatgtggccggatctgcaaaaacacaaagggccgttgaacgtcttcgagaatatcgaaatgccgctggtgccggtgcttagtcgcattgaacgtaacggtgtgaagatcgatccgaaagtgctgcacaatcattctgaagagctcacccttcgtctggctgagctggaaaagaaagcgcatgaaattgcaggtgaggaatttaacctttcttccaccaagcagttacaaaccattctctttgaaaaacagggcattaaaccgctgaagaaaacgccgggtggcgcgccgagtacgagcgaagaggtactggaagaactggcgctggactatccgttgccaaaagtgattctggagtatcgtggtctggcgaagctgaaaagcacctacaccgacaagctgccgctgatgatcaacccgaaaaccgggcgtgtgcatacctcttatcaccaggcagtaactgcaacgggacgtttaagcagtaccgatcctaacctgcaaaacattccggtgcgtaacgaagaaggtcgtcgtatccgccaggcgtttattgcgccagaggattatgtgattgtcagtgcggactacagccagattgaactgcgcattatggcgcatcttagccgtgacaaaggcttgctgaccgcattcgcggaaggaaaagatatccaccgggcaacggcggcagaagtgtttggtttgccactggaaaccgtcaccagcgagcaacgccgtagcgcgaaagcgatcaactttggtctgatttatggcatgagtgctttcggtctggcgcggcaattgaacattccacgtaaagaagcgcagaagtacatggacctttacttcgaacgctaccctggcgtgctggagtatatggaacgcacccgtgctcaggcgaaagagcagggctacgttgaaacgctggacggacgccgtctgtatctgccggatatcaaatccagcaatggtgctcgtcgtgcagcggctgaacgtgcagccattaacgcgccaatgcagggaaccgccgccgacattatcaaacgggcgatgattgccgttgatgcgtggttacaggctgagcaaccgcgtgtacgtatgatcatgcaggtacacgatgaactggtatttgaagttcataaagatgatgttgatgccgtcgcgaagcagattcatcaactgatggaaaactgtacccgtctggatgtgccgttgctggtggaagtggggagtggcgaaaactgggatcaggcgcactaagattcgcctgaacatgccttttttcgtaagtaagcaacataagctgtcacgttttgtgatggctattagaaattcctatgcaacaactgaaaaaaaattacaaaaagtgctttctgaactgaacaaaaaagagtaaagttagtcgcgtagggtacagaggtaagatgttctatctttcagaccttttacttcacgtaatcggatttggctgaatattttagccgccccagtcagtaatgactggggcgttttttattgggcgaaagaaaagatccgtaatgcctgatgcgctatgtttatcaggccaacggtagaattgtaatctattgaatttacgggccggatacgccacatccggcacaagcattaaggcaagaaaattattcgccgtcctgcgtttcttctacaggctgcatctcgctaaaccaggtatccagtttctgccgcagcttgtccacgccttgtttcttcaagctagaaaacgtttcaacctgcacatcaccgttaaacgccagtacagcttcacgcaccatattcaattgcgctttacgtgcgccgcttgccagtttgtccgctttggtcagcagcaccagaacggcgatattgctgtctaccgcccactcaatcatctgctgatccaaatctttcagcggatggcgaatatccattagcaccaccagaccttgcaggctctgacgtttttcgaggtattcgccgagcgcacgctgccatttgcgcttcatctcttccgggacttccgcataaccgtacccaggcaagtcaaccagacgcttgccgtcagccacttcaaacaggttgataagctgggtgcgccctggggttttactggtacgagccaggcttttctggttagtcagcgtgttcagcgcgctggatttacctgcgttggaacggcctgcaaaagccacttcaattccggtatcggaaggtaggtggcgaatatcaggcgcactcatcacaaaatgcgtctgttgataattcaaattagtcaaagcggtcgtctccgtcagtcaaagctttgtggcgattatacctgaaccataataaaaggcggatttttcggcgtgagcgttgtaagtaaaagccatacgctttgtgagacattgccgatagtctttatgcgaaatagcagagaaaattctgcgatgcatgtcaaataagctatataaatcagtgaattgcttttatataaaactctgaaaatgtgcaaatactgatggcggttgattgtttgtttaaagcaaaggcgtaaagtagcacccatagagcgaggacgctaacaggaacaatgactcaggatgagggtcaggagcgccaggaggcgaagacagaggattgtcaggaagacaaacgtccggagacgtaattaaacggaaatggaatcaacacggattgttccggctaaaggaaaaacagggtgtgttggcggcctgcaaggattgtaagacccgttaagggttatgagtcaggaaaaaaggcgacagagtaatctgtcgccttttttctttgcttgctttctgttagattccgccgcaaatctatactgaataaaacggctaaaagacgaaccattatgaaaccaagttctagtaacagtcgcagcaaaggtcatgcaaaagcgcgtcgaaaaacacgcgaggagctggatcaggaagctcgtgatcgcaagcgtcagaaaaaacgtcgtggtcatgcgccgggcagccgcgcagcgggcggaaacaccacgagtggcagcaaaggccagaacgcaccaaaagatccacgtattggcagtaaaacccctattccattgggcgtgactgaaaaagtcaccaaacagcacaaaccgaagagtgagaaacctatgcttagtccgcaggcggagttggaattactggaaacggatgagcgtctggatgcgctgctggaacgtctggaagcaggcgaaaccctgagtgccgaagagcaatcctgggtggatgctaaactggatcgtattgatgagttgatgcagaaactcggcctctcttatgacgatgacgaagaagaggaagaagacgagaagcaagaagacatgatgcgtctgctgcggggcaactaacggattgccgccgtgggccttcccgttctgctgataacccttccggttatatgttatctggtgtggttattcgttaaactacagcggttgtcgcggcgacaaaagtggctgcgcaaccggctgatgacccgaaacgggcatccgccggtacgccgtagccgccagagacgccatcggaaggagtgagcatgtctgtacagcaaatcgactgggatctggccctgatccagaaatataactattccgggccacgatacaccagctacccgaccgcgctggagtttagtgaagacttcggcgaacaggcgtttttacaagccgtggcgcgctatcctgagcgtccattatctctctacgtacatatcccgttctgccataagctttgttacttctgcggttgcaataagattgttactcgccagcagcacaaggccgatcagtatctggacgcgctggagcaagaaatcgtccatcgtgcaccgctgttcgccgggcgtcacgtcagccaattgcactggggcggcggaacgccgacgtatctgaataaagcgcaaatcagccgcctgatgaagctgctgcgcgaaaacttccagttcaatgccgatgcggagattagcatcgaagtcgatccgcgggaaatcgaactggatgtactcgatcatttacgcgccgaaggctttaatcgcctgagcatgggcgtgcaggacttcaacaaagaagtgcaacgtctggttaaccgcgagcaggatgaagagttcatctttgcactgcttaaccatgcgcgtgagattggttttacctccaccaacatcgacctgatttacggcctgccgaaacagacgccggagagtttcgcctttaccctgaaacgtgtggcggagctgaaccccgatcgtctgagtgtctttaactacgcgcatctgccgaccatttttgctgctcagcgcaaaatcaaagatgctgacctgccgagtccgcagcaaaaactcgatatcctgcaggaaaccatcgccttcctgacgcaaagcggctatcagtttatcggtatggatcactttgcccgtccggatgacgagctggcggtggcccagcgtgaaggcgtgctgcatcgtaacttccagggctacaccactcagggcgataccgatctgctggggatgggcgtttccgccatcagcatgattggcgactgctacgcgcagaaccagaaagagttgaagcagtactatcagcaagtggatgaacaaggcaatgcgctgtggcgtggtattgcgctaacgcgtgatgactgtattcgccgcgatgtgattaagagcctcatctgcaacttccgtctggattacgcccctattgagaaacagtgggatttgcacttcgctgattactttgcggaagatctcaagctgctcgccccgttagcaaaagatgggctggtggatgtggatgagaagggaatacaggtgacggcgaaaggtcgcttgctgatccgcaacatttgcatgtgctttgatacctatctgcgccagaaagcgcggatgcagcagttctctcgggtgatttaaatagtgaatggcgcttcgtttacaaagtagaaaacgaaagcgccatcaatgtgctgagaacaagattgcctgatgcgctgggcaacaaaacctgttgaaattattgcttttgtaggccggataaggcgtttacgccgcatcaggcatctgagcatgatgcctgatgcggcgctggtcgcgtcttatcaggcctacgactttctccgcatccggcataaacaacgagcttcagctaaacagcccaatcattgcggcacacagcacggcagcaacggcagtttgcggtgtgtggctgtcaactgcgccactcgataccagattaattattgattccagcataatgactctccccgttttccgggcaagatcatactgaacttatcggaacagtaaagcgtaaaataccagcaatttgcgctcaataatcaatctttacacacaagctgtgaatcactccatccccagctcttttaacttacgcgtcagggtgttgcggccccagccgagtagccgcgccgcttcctgtttatgcccctgcgtatgtcgcaacgcggtcgtcagtaacgtccgctccagctctggctgcgcttcggaaagcagattttgatgaccggaacgcagcgctctgtctgcccactgcgcaagaagcgtcgcccagctgtccggttgcatttggctagtactctccgcaaccgtactttcaaacagttcgccgggcaaatcctgaatcaacacttcctgcccggcggccatcaccgttagccagcggcaggtgttttccagctggcgcacgttgcctggccacgccagacgcgtcagagcagcttcggtttccggatgcagtaacttcgcttctacgcccagttcgcgcgcggcaacctgtaaaaaatggcgcgccagacggggaatatcttcccgacgttcgcgcagcggcggcagatgaacgcggataacgttcaggcggtggaacagatcctcacggaacttaccttcctgcactcgctgttcgagattctggtgagtggcagcgataatccgcacatccactttcaccggcgcatagccgccaacgcggtaaaactgaccgtctgccagcacgcgcagcaaacgcgtctgcacatccagcggcatatcaccaatttcgtcgaggaataatgtaccgccatcggcctgttcaaaacgcccctgacgaatggtattcgcgccagtaaacgcgcctttctcgtggccaaacagttcactttcgatcaaatcttttgggatagctgccatattcagcgcgataaacggcgctttggcgcgcggactgtggcgatgcagggcatgagcgaccagttctttaccggtgccggattcgccgttaatcagcacgctaatagaagaacggctaagccgaccgataatacggaacacgtcctgcatggctggcgcttcgccgatgatatcggtcgttgggccgttaagctgaacattacgcggctgctgctgttcctggtaatgactgatagcgcgctcaaccagcgccactgcttcgtcgatatcaaacggtttgggcagataatcaaacgccccttgttgataggcgctgacggcagcatccagatcggaatgtgcggtcataatgatgaccggaagcattggatggcgctgtttaatctgcttgagcagcgccagcccgtccattcccggcatacggatatcactaagcagcacatccggcgttttgctcgccagcgcctccagcacttctgcgccgttctcaaacgtcgtacaggttaaacctgccccagcgagcgcacgttcaagcacccaacggatggaactatcgtcatcgactacccagactatccctcgttgcataaacgtcacctttatttcctgataggcaggtaaacgctgaactcggtatgccctggccaactggtaaattcaattttgccactatgctgatcaatcaaattacgagcgatggataagccaagcccggtgccaccttcgcggccgctgaccatcgggtaaaacagcgtatcctgcaaatgaggcggaatgcccggcccgttatcttccacatcaatccgcgccgccagccggtagcgctcgccgtgtaaggtcagttgaaacgcggtgcgggtacgcagaatgatttcaccgccttccggccccagcgcctgtagcgcattgcgcacaatattcagcaagacctgttcaatttgatccgggtcgtgcgccagttccggtaggctgggatcgtaatcacgaatcaaccgcacgttgtccggcagttccatgctcaccagcgttaccacgcgttcagccactttgtgaatactttcggtaacgcgcgtaccgggcagctgcggccccaacagacggtcgaccagatttcgcagccggtccgcctgttcgataatcactttggtatattcgagtagacttgggtcaggtaacgctttgctgagcagctgcgccgcgccacgtaaaccgccaagcggatttttaatctcatgtgccaggccgcgcactaaatcacgggcagcaacctgctgggcgtgctgtagctgttcctgacttaagcggcgctggttatccatcggagccatctccagcaggatcatgccgtccggcatacgctgggccgtcacagaaaggatatggctgcgcccgtcgatgaccagcgtcacttcgttatcggtaaaaccttgccccgcctccagactttcttgcatcagctcgatatttaaactgaagtagctcaacagttccggtaacggtgtaccaaacaatttgcgggagctttgggcgagcagttgttgcgcggcagggttggcgtaatggatcgccaggttgtcatcgattaacaaaatactgttaatcaggctgttgaggatctgcccagcatcgggctgcgtgcctgttgccataaagcagtctcctgaacaggttgcaccattttagtgcattatagctttttacggataaaaagcgcgaagcatcagagaattgacggagaaaaaagcccatgcagagatgggctacagatagctgacaaacttcacgttggagagcgactcacctgctccggcctaccacatcatcaccgtgtaggccggataagacgcatttgcgtcgcatccggcgtgatgtgcttgccaccgatcccaggcctgccagagacaggcgaaaagtttccacggcaactaaaacacttagacgctgtagtacagctcaaactctaccggatgcggagtcatacgcacgcggtcatcttcttcgcgacgcagagcgatgtacgcatcaattgcttcgtcagtgaacacgccaccggctttcaggaactcgcggtccagatccagttcgttcagtgcttcttccagagagcctgcaacctgtgggatctctttcgcttcttctggcggcaggtcatacaggtttttgtccatggcttcgcccggatggatcttgttcttgataccatcaagaccggccatcagcagggcagcaaagcacaggtacgggttagctgccggatccgggaaacgtacttcgatacgacgtgctttcggagaagaaaccaccggaatacggatagacgcagaacggttacgcgcagagtaagccagcattaccggtgcttcatagcccgggaccagacgcttataagagttggtggtcgggtttgccagggcgttaatcgctttagcgtgtttgattacgccgccaatgtagtacagcgcctgctcagacagacctgcgtatttgtcgcctgcgaacaggttaacgccgtttttagacagagacatgtggcagtgcataccggagccgttatcaccgaacatcggttttggcataaaggtcgcggttttaccgaagcggtgcgctacgttgtgcacaacatatttgtagatctgaatttcgtcagcttttttggtcatggtattgaagcgggtagccacttcgttctgaccagcagtcgctacttcgtggtgatgggcttcaaccaccagacccatctgttccatcaccagacacatttcagaacgaatatcctgagcgctgtctaccggtggaaccgggaagtaaccgcctttcactgccggacggtgacctttgttaccaccttcgtattgggtggaggagttccatgcgccttcgatatcgtcgatagcaacgtgggaaccggagatagaacttccgaaacggatgtcatcgaacaggaagaattcaggttctggcccgaacagtacggtgtcggcaatgccagtggaacgcaggtaatcttcggcgcgcttcgcaatggagcgcgggtcacggtcatagccttgcagggtgccaggttcaaggatgtcgcaacggataatcagggtggagtcggcgaagaacgggtcaatcactgcggtggatgcgtctggcatcagcaccatgtcggactcgttaatgcctttccagccgccaatgctggagccgtcaaacattttgccttcttcgaagaattcagcattcacctgatgagcagggatagtgacgtgctgttctttacctttagtatcggtgaagcgcaaatcaacaaacttcacttcgtgctcgttcagcatcgtcagtacgtgttcagcggacatactttaactctcctggattggtcatggtcgtcgtggtaacgaaatctgcaattattttggccgtgtcgccgtaaaaaagataaagcgaaatctgtgccaacttttaaattgcccctaaaaggcgttatcatgcgcaccatcgtgcaaaagggctgcaccacgatgtgaatgttgcaccaatatagtgcttcaatggaaacattaagcaccatgttggtgcaatgacctttggataaccctttttatgctccgtgaaagcgatcacaaagggactctgcaatacttgtttgcggaggatgtttgtgatcctgttttgtagtgcgattaatccgtgtacaataacgcgctatttctaatgcctgaggcaaagttgtgatcgaaaaattgcgtaatatcgccatcatcgcgcacgtagaccatggtaaaaccaccctggtagacaagctgctccaacaatccggtacgttcgactctcgtgccgaaacccaagagcgcgtgatggactccaacgatttggagaaagagcgtgggattaccatcctcgcgaaaaacaccgctatcaaatggaatgattaccgtatcaacatcgttgataccccggggcacgccgacttcggtggtgaagttgaacgtgtaatgtccatggtagacagtgtgctgctggtggttgacgcatttgacggcccgatgccgcaaacgcgcttcgtaaccaaaaaagcgtttgcttacggcctgaagccgattgttgttatcaacaaagttgaccgccctggcgcgcgtcctgattgggttgtggatcaggtattcgatctgttcgttaacctcgacgcgaccgacgagcagctggacttcccgatcgtttacgcttctgcgctgaacggtatcgcgggtctggaccacgaagatatggcggaagacatgaccccgctgtaccaggcgattgttgaccacgttcctgcgccggacgttgaccttgacggtccgttccagatgcagatttctcagctcgattacaacagctatgttggcgttatcggcattggccgcatcaagcgcggtaaagtgaagccgaaccagcaggtcactatcatcgatagcgaaggcaaaacccgcaacgcgaaagtcggtaaagtgctgggccacctcggtctggaacgtatcgaaaccgatctggcggaagctggcgatatcgttgcgatcacgggccttggcgaactgaacatttctgacaccgtttgcgacacgcaaaacgttgaagcgctgccggcactctccgttgatgagccgaccgtttctatgttcttctgcgttaacaccagcccgttctgcggtaaagaaggtaagttcgtaacgtctcgtcagatcctggatcgtctgaacaaagaactggtacacaacgttgcgctgcgcgtagaagaaaccgaagacgccgatgcgttccgcgtttctggtcgtggcgaactgcacctgtctgttctgatcgaaaacatgcgtcgtgaaggtttcgaactggcggtatcccgtccgaaagttatcttccgtgaaatcgacggtcgtaaacaagagccgtatgaaaacgtgactctggacgttgaagaacagcatcagggttctgtaatgcaggcgctgggcgaacgtaaaggcgacctgaaaaacatgaatccagacggtaaaggccgcgtacgtctcgactacgtgatcccaagccgtggtctgattggcttccgttctgagttcatgaccatgacttccggtactggtctgctgtactccaccttcagccactacgacgacgtacgtccgggtgaagtgggtcagcgtcagaacggcgtactgatctctaacggtcagggtaaagcggtcgcgttcgcgctgttcggtctgcaggatcgcggtaagctgttcctcggtcacggtgcagaagtttacgaaggtcagattatcggtattcatagccgctctaacgacctgactgtaaactgcctgaccggtaagaaactgaccaacatgcgtgcttccggtactgacgaagccgttgttctggttccgcctatccgcatgactctggaacaagctctggagttcatcgatgatgacgaactggtagaagtgactccgacctctatccgtattcgtaaacgtcacctgacggaaaacgatcgtcgccgcgccaaccgcgcaccgaaagacgattaatttcgttttttagtcataaaaaacctgccagcgatggcaggttttttttgcctgtcgtgagcgcacaccaatgcgagtatctcccttataagtctgtggttacgtcaatagagagctttgtcacaattatctgcaaagtcatacgccgttaattgctttcttttttggcgtaagcgtaagatgcttcatctggtttaaaccaaaaggattaaacaatggcggagaatcaatccaccgtagaaaatgcaaaagagaaactggatcggtggttgaaagatggcatcaccacgccgggtggaaaactccctagtgaaagagagctgggagaactgctgggcattaaacgtatgacgctgcgccaggcgttgttgaacctcgaggcagaatccaaaatcttccgtaaggatcgtaaggggtggttcgtgacccagccgcgatttaattacagtccggagctgagcgcgagctttcagcgggccgcaattgagcaagggcgagagccttcctgggggtttaccgagaaaaaccgtaccagcgatattcccgagacgctcgcgccactgattgcagtgacgccaagtactgaactctatcgcatcaccggctggggggcgctggaaggacataaagttttctatcacgaaacatatattaatcctgaagttgctccgggctttattgaacaacttgaaaaccacagtttttctgcagtctgggaaaagtgctaccaaaaagagacggtagtaaaaaaattgattttcaaacccgtcagaatgccgggcgatatcagcaagtatcttggcggttctgcgggtatgccagcgatcttaattgaaaagcatcgcgccgaccagcaaggcaatattgtccaaatagatattgaatattggcgatttgaggccgtagacctcatcattaatctgtaagtgttttatggtgacaataaataacgcaagaaagattctacaacgtgtcgacactcttcctctttatttacatgcttatgcctttcatttaaatatgcggctggaaagagtgttgcctgctgatttacttgatatcgcaagtgaaaataatctacgtggcgtcaaaatccatgttctcgatggcgagcgtttttctcttggtaatatggacgataaagaactctctgcctttggggataaagcccgccgtctgaaccttgatattcatattgaaaccagcgccagtgataaggcatctattgacgaagccgtcgccatcgcgttgaaaactggggcaagctccgtacgtttttatccacgttatgaaggtaatttgcgcgacgtattaagcattatcgctaacgacattgcctatgtacgggaaacgtatcaggacagcggcctgacttttacgatcgagcagcatgaagatttaaaaagtcatgagctggtgagcctggtcaaagaaagtgagatggaatctctttccttactgtttgattttgcgaacatgatcaatgcaaatgagcatcccatcgacgctttaaaaacgatggcaccgcatattacccaggtccatatcaaagatgccttgatcgttaaagaaccgggtggcctgggtcataaagcctgtattagtggtcagggtgatatgccgttcaaagcgttattaacgcaccttatctgcctgggtgatgatgagccgcaggtgacggcatatggcctggaagaagaggttgattactatgcgccggcgttccgctttgaagacgaagatgataatccgtggatcccttatcgccagatgagtgaaacaccattgccagaaaatcatttactggatgcgcggttacgtaaagaaaaagaagatgcaattaatcagataaatcatgtgcgtaacgtactacaacaaatcaaacaagaggcaaaccatcttctgaaccactaataagttttaactcatacgcagttaataaaaccattccatatgaatggtcggtatcttattgcctttaaaacagtgattttaaaaatcgcttaggggatgttatgctcacgaaaaagaaatgggcgttatttagtctattaacactgtgtggcggtacaatttataaattaccgagcctgaaagatgcgttttatatcccgatgcaggaatatttccatttgaccaatggtcaaattggtaatgctatgagcgtaaacagttttgtcaccacagtgggcttttttctgtctatttattttgccgataaactaccgcgcagatacaccatgagtttcagtctcattgcgacaggattactgggtgtttatttgacgacaatgccggggtattggggcatcctctttgtctgggcgctatttggcgttacttgcgacatgatgaactggccggtcttgctcaagagcgtaagtcgattgggcaatagcgaacaacaaggtcggttgtttggcttcttcgaaacagggcgtggcattgtcgataccgtggtggcattttctgcgttggcagtatttacctggtttggcagtggcttattaggttttaaagcaggcatctggttctattcccttattgtgattgccgtaggcattattattttctttgtcctgaatgacaaagaagaggcaccgtccgttgaggtgaaaaaagaagacggagcaagcaaaaacaccagtatgaccagcgtgctgaaagacaaaactatctggcttatcgcttttaacgtcttcttcgtttacgcggtttactgtggcctgacattcttcattccattcctgaaaaacatctatctattgcccgttgcgctggtgggggcttacggcatcattaaccaatactgtctgaaaatgattggtggaccgattggtggcatgattagtgataagatcctgaaaagcccaagtaaatatctatgctacacctttatcattagtaccgctgcgctcgtactgttgattatgctgccgcacgaaagtatgccggtctatttagggatggcatgtacgctgggctttggcgcgatagtctttacacagcgagccgtattttttgcacctatcggcgaagcaaaaattgctgaaaataaaacaggtgcggcgatggcgttgggtagctttattggttacgctccggcgatgttctgcttcagtctgtatggctacattctggatttaaatccggggattattggctacaaaatcgtgtttggcattatggcctgcttcgcattcagtggtgcggtggtttccgtaatgctggttaagcgtattagccaacgtaagaaagagatgctggcggctgaagcttaattaatggccggatgtgcttaatccggccaacgaaaaccgtatcaaccgtaggccggataaggcgtttacgccgcatccggcagtttcacatcagaagaaatacttcgtcccgatacggatctggttttgctcgcggtggtacggttcgacgttgcggtctaaccagcgcaattcgaaataagggagccagtgttcattaatacggtaacggaaggtgttagtgatttcccaatgatgatctttcccgttgctactattaaagtcattcactcgcatgaagtaatgtggctcaaatgtataggaaaatttatcggtgattttaaaattccagtaggtgccaatttcataggtgtcattattatccagttccccgctcaaatctgtactactatagttattatggttatagcgatttcgtactgtcagattaaaccatggtacaaatttatagttgacgtccagatacactgcaccaccgctaccgatactcttatcattaattaagccaccgggctggatggttaatttatcggttggtttaaataacggataccagccttcaatttcgttatatccatgttttagttcatcttctcgctgaaagttgtaggtattggttaacataatacccgcgcccatatcgaagttataacccacacgtagcataacctcgccctgatcggaggcaagattatatgcctccctgttttcgacgtatgcgccagcaaatacgctggcagaggtcagagaagataataaaattattgcattaatctttttcataataagtccattttttaaacgtagggaggccgccacccaccaggatggaaatagcggctattgacatttataacgttacggaagccgttttttcttctgtcgccatctctttatttttgcgttggttgatttcctcaataatcaatgcaaaccgtttttcattgagtgtgtaaaagaatcccatcgtcaatgcagcaataattgccagtgcacaaggccagataaaaatgagctgacgcaaaccctgtaatgtcgcatcgctttgcgcgatgttgggaacataaccaatttgcgtcagcataatgcctggcaagaagccagcaagtgcggcagaaattttacgaaagaaggtataaccggtataaacagaaccttcggcacgaataccggttttccattcaccgtaatctacggtatctggtaccagtgcccagttcaggctgtttacaaaggccgtgccaaaaaaggcgacacaagagaacatgacgaaagtgaaagagttacttccccagaaataattcagtatatcacccaccgcccacagcaccatgccagccagataaacctgttttttaccaaaacattttacagttaatggcaccagtaatacgccgatgaggatgcatcccatactgaagaatcccatccagctcaataaattaatatcattcagcacatactgggtgtaatagacctgaatcgccagtttgatattaaatgccgccagggtacacaagttagcaatgcataaaaccagcaatggcggattccgaaatatcgcgcaaaaacttttgagaatactggctttatgtccggttggcgttgtgtccacataatgctctttgacgcctctgtagcacagcatcataaaaataaagccgccaatggagaacataagtgccgcacaggcataaccgacggtactgtcagaaaaaaggctctgcaacggaataaacgccacggtacaaatcaatagccctatggttgcaccaccctggcggtaagccgcgagctgcgcgcgctcattcgggtttttggtaattgccgggatcatcgcaccatagctgcagttcatcagactgtaactaagtccaaacatcataaacagcgcggtggcaatcgtcgttttaaccggcaaacaaaaggtggtggcgataaactggagcgttgcaattaacgccgccggaaccgctgcatataaaataaagggacgaaatttgcctttaggcccaatatttttccggctgtcgagtaaaaatccggtgagcatatcggtaaacgcggtaaaaaacttcgccaccagaaagataatcccgccatagtaagcaggcatccctaattcatcggtataaaatttgaggagatacagagtaccgatgcagagcattaaattgctaccgacgtcgcccataccataggcgattttttcccgcagattcagttttaatgtcagtggattatggtcagacataatcactccttataacgccccgcagggcgtcgtttattattattacgccgtgcgtttacgggcttctatctcttccacaatgcggacatacatcttctcgttcaggctgtagaagcaacccatcgccacaatggtgactaccgccagtgcgcttgggtagatgaagatcaactggcgtaacccttcaatggtgtggtcagcctgtgcgacgttcggcacatagccaatttgcgtcagcatccagccggggaagaaaccagccagcgcctgagacactttgcgaaagaaggtaaaaccggtgtagaccgttccttcgctacgcacgccggtgcgccactcgccgtactcgacggtgtcggaaaccagcgcccagttcaggctgttaacaaacgcactgccaaagaacgccaggcaggagaacgccacgaagctgacgctaccgccgccgaagaaatagttgagcagatcgcccagcacccaaatcagcaggccgccgatataaactttcttcttgccaaaacgtctgacactggcaggcatcaggaatacgccgatgaaaatacagcccatgctgaaaaatcccatatagctcaacaggatgggatcgttaagcacgtactgggtgtaatagacctggatggcgagcttgacgttaaacgcccctaaagtgcagaggttggcaatgcacagaatgaacagcgggcggttacccgcaattgcgcggaaagattgcagcaggcccggcttttgcgccggattagcaggctgggtttcgacataacgctctttcacgccgctgtagcagatccacataaacagcaggccaaacagactaaacagcgtggcggcgaagatatagccaagttgctgattaccttcgataagattcataactggcacgaatcccaccgtgcacagcagcaggcccagcgtagcgccgccctgacgccatgccgccagactggcgcgttcgttggggtttttggtgatagcgggaaccattgcgccgtaggagcagttcatcatgctgaaaaacagtccgtaaagcataaacagaatagtggccatcaccgttttaccggtgacatcaaacggtgtgccgacaaagttggcgatcgccagtaaggtgaccgggaaactcgcatacagaataaaaggacggaacttaccttttggaccgatcttgcgtcgggaatccaacataatgccggtacccatatcggtaaacgcagtaaagaatttactaatcaaaaagataatgccgccataggtgcctggcagccccagaacgtcggtataaaacttcaaaagataaagcgtaccgatatccagcaggatgttagaggccaggtcgccaataccgtaagagagtttctctttaaagggcaggcgtaaagttgctggatcttccgttgtgatgtgactcatgcttgttctccctttgcccatgagtttccccacgggcggatgtgattagatgctttttaagctcgcgaacagtgccgcccattcgctatcggcgcgataaaagaccggcggcttgccgatgggcgcattaacggtaacttccccgccccggaacgcttcacccgtccaggcgtggacccagttatcctccggcagatagagcgtccagtcgctacggccttcttcatgcaccggagcgaccagaatgtcgcgacctaacaggtactgatatttcagggtgtaagtgtgcgcatcgtcttcgtaatgcaggaacagcgggcgcataaccggcaggccggacttcgcattcagcgcgacggcctctttcaggtaaggtttcagggtggtgaagacggtggtcatacgggcgaaatgggcgatggtttctgcgtcgccgtcaaactgccagttgtcgccaggacggttaccttcgtgggtgcgcatcatcggcgtgaaggcgctgaaatcgcaccagcgcagcagcagctctttgctgcgcttcatctcaaacagggtggtgtaaccgccaatgtcgctgtggtgcaggccatgtccggtcattgccaggctcagcgccgccgggacaacgctcgccaggccatcgtcgagactccagtcgacgttctggtcgcccgcccacatcatggtggagtatttctggctaccggtagaaccggcgcgcataaagaaaaggatctcgccgagcttgcccgtttcttcaagggcttcgtagttacacttcgcccacagcgcaggccaggcgttatgcataatttcggcactgacgccgttatgcaagtacgtgtcggtgggcagatactcgccgaagtcagccatccagccgccgcagccgagttcaatcatgttctttttgatcacttccttgaaccaggcgtaggcttctggattagtgagatcgacaacgccgccgtaaaactcgccaaactccaccagatagtcaccgccagaggcatcttttgccagatagccgtgttgtgccgcttcttcgcagagatctttatcgctggcaacatacgggttgatataggccaggaactgcacgccctcctgattccactgcttaatgcgactatccagttgcgggtagttttcgctgttccacttccagttccacatcacgcgtttgccaaaagaggtcatacgaataccggaccagtcctgcgcccagatgccgttgaccttcacgcccgcgttacgcatggtgtccagtttcttctggcacacttccgtcccgccctgaatgccgagcgttactccgtcataaatccagtcgggcagttctggctggcgtcccagcagggcggttaatttttccagcagggaaatgtatgtgtcagcacattcaaaacgcagcgttgctttgtcttcccacagcgccagttcatggtattccggggcactaaagtcgaagttcatatagcaactgttatcaacatggcagtaatacttctgcgtgctgacaaacgtaggctgtgggaagaaagtccagtaatagtcgccgcccgcattttctttgcagtcggcctgccaggtgacataggtttgtttgttgcgaccaacgccttgttcactggtccatagcgggaacggtttgccacgcagatcgaagtaggaaaactgttcgccgcagccgtagatatggtcctctggttgagcggcaaggcgcagccagatacggttgtggttaaggttgtcgttttgtagttccagcaataaacgcccctgatcgtcggcagagatattcagcgtggcgctaatgtcagaaccacggctgaaatgaattaaccaaccatccggactctggctgacgatggcgtcggtaagcgcaattttctcctgtagtttatctttaatgctgaaattaccgcggaacatatcgatatccgctataccactgccaatccataaacaaggattatctttgctatgggttaaaataagacgttgttgaaaatgtagggtaaaactgtcgttattctgatgaaattgaaaatctaataactgtggacgtggcgtatccataactaatctccatagagttgagaacgagattgttgccttcctgttattacaggcttatgtaaaatgattctcataaaactgatatataaaaactttacagaagctgagctgtttttaacttaataaattgaagatacataatgttgcctttagcgagtgaaatgttcttcaatgattttgactgctaatcaatacaagttattttctctgtccgtaaatattaaaaaacaggcggtgcggttttccactttccagtaataataagtcgataccactattaaaggcgttaggcgggcaactcataggttcaactgccagtccctgacgctgtaatttttcaccgctataaacctgcacccagagttgatcggaacaaaggcttacgctaagcgcctgctgtggatgggtaatggtcatttcccacaaatcattagcggttttaaaggtgtggtcgatttttgtcgcggctatttttttcgcctgcgtgaaatttaaatccagctcatcaacgtggtgaagcgttgtcggattcgcgtgctcatcgacggcataaacctggtttgccggaagctggaacagatattcatcaacagatgttaagttgcaggttaaataaggatgaatacccacgccataaggcgctgcgacagtgccgatattctggcttgcgatctcaacggaaagacccgtgtgtgcgttgaggctataaacaacttgactagccagcataaacggatagccgtaactgggcggcagaaaagctgtcagggtaacgctggtggcggttaattcactaatttgccagtctcgccaggcaagcagcccgtgaatagcggctttactactatgttcattaatgggtaactgatattcctgcccctgatagcggtaacagccgttggcgatccggttcggccacggaataagcactttacccagatgcgccagcggcatctcttcgggtttgtgcgggatgactaaatgacaaccctgaaaggttaattcagccagaccagcaccgacggtcacaatggtcgcgtgataatcccccgcggcaagactaacggtctgtccactgcaatgcatattggtgatttgcatacaaggcaccttaattaagctcatacagcctcccgtgaggctgatgtcaaacccaaaaactgcaccggacggtcccctcgcccctttggggagagggttagggagaggggaaaacccgcaccctattttcagatcagttatttcgcattaatatccagcagacccgctgcaaccgctggagccatgccgggcgctaacgggatacgcgggatcaccaggcaatgcagcaggtgataaatatcctgtttgccgtcccagactttggtggtgaccttattgtccgcatccagctcctgccaccaggaaccattttcatagtccatcaggtacttaatgcagtactcccaccatgtttgataccaggtttcatactggcgatcgccagtgacggtgtagagcgcgtaggccgtacccattgcttcgacgataggccaacgtacacgttcgcggaccaccggttttccttcccagtcaacggtataaacaatcccgtccgcgccatcgggtgcccaggcatcgcgcacggtggcgttaaacagacctttggcatcttctagcagccatgctggtggttgttcgcaacgggcttccagggcagcatggatgtgcagcattaaacggccccattcgatccagtggcctggtgtacctccgaacgcgcggaagcgatgcgccgggttatctttgttgtaatccggcagcggattccactgggtatcgaagtgttcgttaacgcgataatgattatttctggcgacgtcgtggataatcacggaagccacgcgaatcgcgcgatccagccattttttgtcgtgagtgacgtcataaacaatcaagaaagcttccaccgcgtgcatattggcattgccgccgcggtactcttcggttttgctgaaggcttcgtcccaggattccaggcacatctgctcttcttcgctccagaaatatttctcgataatttcaatggtgtaatcgagcagcttgcgcgcttccgggtgacccgttgtgacggcgctggcggcacccagcagagcaaagaagtgttgatagccctgtttggaggcatccaccacgccctcgtcattcacgcaggcataccagccgccatattttttatcacgcagtgcgccgttcatggctttgataccgtgatcaaccaagctgtaagcgccaggtcgacccatcgccgcagcaacggaataaacgtgcaacatacgagcggtgatccacagatgggtgcccatctcttctttgatttgccctttattgcctaaccagccaaaaccagtcggcactacggaatttttaccaaaatcaaagatgcggtcggtttcctgttccagccaacggttgtggcttagggtgttaaaccatttcattccttttatcctcatcttagcggcgtttagccatcatttcgtcgacgatatcgccaagttgttgtaatttcggtgcgcaaacgtcacgcagcatcagctcgttgtctggtaaaccgacgacgcttgcccagactgcacggcctgccaggaatccgcttgcgcccgccgtcattgccacgcgtacggcacgcgggaacagtttttcgtcgacaccggaagagaggatcacccatggcatattgatatggtcattcagacgttgactagcacagagaagctcttgttgcggacctttgccataaagcggcatttcaactttgtagaggtcagcgccactgtcgcccagctctttggcggcatcgatgatcgcttgttcgcgatcgaatttatcgccacgacgcggtgggcggacgactggctcaatgatgcttaccagaccgtgactgtggcacagttcgttgaactctttcaccatatccagacgttgctgcgcatcttcatcactacgccacagcaccagcagttttaaggctttgccaccgtcttgtttgatctgtagcggattgattttgcggtcaataaccacgctatcgaccggaataccgttgccaggaatgaactcatcggcggcgacaatcatggcgcaacttttggcaatcgcgttttgctcaaccacctggcggtagcagaattgttgatctaccagaatcgcgctggcataagggctgagggcctttgcagcgttaactttgaaatcagttaaaacgctatcggctaccggagcgggtgccccagccgcggcaaacatcatgcgcatggcttcgcgctgatcgaccgccagcatggcaaaaccgccgcttgcgcgcgtaatgtcgttgatggtgtacttattcattcatttattcctttatccagtcgttacatttttactttggcagtcatcccggcactgacacggacctgttccagaatggcggaccagtcctggcgaccgcgacccgctgcgcgcgcctggctataaacctcccgactggcggcccccagcggcattggcacatgcagctggttggcgacatcaagggcgatgccaagatccttatgggcaagatcgatcatgaaggcgggagaaagatctccgctgaggactttgtttggccaggaagtggtgaagtgacctttaccggcggcggtaccgctcatcactttgacggcaacatcgaagggaagattcagggcttcgcacaaaacggcggcttctgcgctaagcgcattgagcgcgatgctcatgtagttgttgatgagcttaacgcggatccccatgcccggaccgccagcgttgatcaactcactgcccatcgccatcaggatcggtgtggcacgttcaacttgttcagcggtgccgccagccagcagtaacagagtaccggtaatggcatttgcagaagtacggcctaccggaacatccatcatgctgaagcctttggcttgcatatcggcaatcaatttatcggtttgcagcggatggatggtggacatatcaatgaccagcgcatcggtagataagccttcgcaaacgccgttttcaccgaacaacacgttgcgcaccagatcgccattcggcaacatggtaatgataaattcggcatctttagcggcctgcgccgggttggcggcgggagtcgcacctttgtctaccagatgccgcacagcttcggcgttcacatcaaagacgcgaagttgatgcccttgctgcaataaattgctcgccattgggctacccatttgtcctaaaccgataaacgcgattgctgccataaccctctcctgaatacagttatgtcactttttgtcatttatgacatgctttgcttgtctgtttttgatcgtatttgtaatttatcgtcaaaaaattgacagccgtcactttttaaacaattggtgaaattaaaatgaacgcatcccaaaatgtttaaggaatgaccatgattcgtgttgcttgtgtaggtataaccgtgatggatcgcatctattacgtggaagggttaccgacggagagcggtaaatacgtggcgagaaattatacggaagttggtggcgggccagcggcgacggcagcggttgcggcggcaaggctgggggcgcaggtcgattttattggtcgcgtaggtgatgacgacacgggcaacagcctgctggcagagctggaatcctggggcgttaacacccgttacaccaaacggtataaccaggcgaaatctagccaatccgccatcatggtggataccaaaggcgagcggataatcattaactaccccagcccggatctgctgcctgacgcagagtggttggaggaaattgatttctctcagtgggatgttgtgctggcagatgtacgctggcacgacggcgctaaaaaagccttcaccctggcccgtcaggcgggtgtgatgaccgttctggacggggacattacgccgcaggatatcagtgagctggtggcattaagcgatcacgcggcctttagtgaaccgggtctggcgcgcttaacgggcgtgaaagagatggccagtgcgctaaaacaggcacaaacgctcacaaatggtcatgtctatgtgacccagggtagcgcaggctgcgactggctggaaaatggtgggcgtcagcatcaaccggccttcaaagttgatgtggtagataccacaggtgcgggtgatgtttttcacggcgctttggcggtggcgctggcaacaagtggggatttagcggagagtgtccgcttcgccagcggtgtagcggcgttaaaatgcacacgtcccggtggacgagccgggatccctgactgtgatcaaacccgatcttttttgagtctttttgtataaaatgccagggtgatggtttttcgaggaattttcatgagccttaccgaactaaccggtaacccgcggcacgaccaactcctcatgctgatcgccgagcgtgggtatatgaatattgatgagctggcaaatctgctggatgtctccacgcagacggtccgccgggatattcgtaaattaagcgagcaaggcctgattacgcgccatcacggtggcgcgggtcgggcttccagcgtcgttaatacggcgttcgagcagcgtgaggttagccaaaccgaggaaaaaaagcgattgccgaagcggtggcagactatattcctgatggtagtacaatatttatcaccattggtacgactgttgagcatgttgcccgggcgttacttaaccataatcatttgcggataatcaccaacagcctgcgtgtggcgcatattctttaccacaacccgcgctttgaagtgatggtgcccggcggtacgttgcgctctcataatagcgggatcattggccctagtgcggcgtcctttgtggctgattttcgtgctgattatctggtaacaagcgttggggcgattgagagcgatggcgcgttgatggagtttgatgtaaacgaagctaacgtggtgaaaacgatgatggcgcacgcgagaaatattctgctggtcgccgatcacactaagtatcatgctagcgcggcggttgaaattggtaacgtggcacaggtcactgcgctctttaccgacgagctgccgcccgctgcgctaaaaagtcgcttacaagacagccaaattgaaatcattcttccccaggaagacgcgtaaatttttgtgaccgttaacctggcttcataccttgccacatagccaaacccatcctttcccgctacagttaatttcttgtggcgcgaaaggaggcaaaaatgctctatatctttgatttaggtaatgtgattgtcgatatcgactttaaccgtgtgctgggagcctggagcgatttaacgcgtattccgctggcaagccttaagaagagttttcatatgggggaggcgtttcatcagcatgagcgtggggaaattagcgacgaagcgttcgcagaggcgctgtgtcatgagatggctctaccgctaagctacgagcagttctctcacggctggcaggcggtgtttgttgcgctgcgcccggaagtgatcgccatcatgcataaactgcgtgagcaggggcatcgcgtggtggtgctttccaataccaaccgcctgcataccaccttctggccggaagaatacccggaaattcgtgatgctgctgaccatatctatctgagccaagatctggggatgcgcaaacctgaagcacgaatttaccagcatgttttgcaggcggaaggttttagtcccagcgatacggtctttttcgacgataacgccgataatatagaaggagccaatcagctgggcattaccagtattctggtgaaagataaaaccaccatcccggactatttcgcgaaggtgttatgctaaaaaccattcaggacaaagccaggcaccgtacccgtccactatgggcctggctaaaactactctggcaacgcattgatgaggacaacatgacaaccctggcaggtaaccttgcctatgtgagcttgctcagtttagtgccgctggttgccgttgtttttgcgcttttcgccgcttttcccatgttttccgacgtcagcattcagttacgtcactttatttttgccaactttctgcctgctactggcgatgttattcagcggtatatcgaacaatttgttgccaattccaacaagatgaccgccgttggggcgtgcgggctgatcgtcaccgcgttattgttgatgtactccatcgatagcgcgttgaataccatctggcgcagtaaacgagcgcgaccaaaaatttacagcttcgccgtgtactggatgattttaacgctggggccgctgctggcaggggccagtctggcgatcagttcctatttgctctccctgcgctgggcgagcgatctcaatactgtcatcgacaacgtgctgcgtatttttccgttgctgttgagctggatctccttctggttgctgtacagcattgttcctaccatccgcgtacctaaccgcgacgcgattgtcggcgcgtttgtcgccgcactcctgttcgaagcaggaaagaaaggtttcgcgctttatatcaccatgttcccgagttatcagctcatttatggtgtgctggcggtgatccccattctctttgtttgggtctactggacatggtgtatcgtcttgcttggcgcggaaattactgtcactctcggggaataccgcaaactaaaacaagcagctgaacaagaagaagacgacgaaccatgattgcattaattcaacgcgtaacccgtgccagcgtcaccgtggagggagaagtgacgggcgaaattggcgcgggacttttggtgttattgggtgtcgaaaaggatgacgacgaacagaaagcaaaccgtctgtgcgagcgtgtgctcggctaccgcatctttagcgatgccgaaggcaagatgaatctcaacgtgcaacaggcgggcggcagtgtgctggtggtttcccagtttaccctcgccgcagataccgaacgggggatgcgcccaagtttctccaaaggtgcaagtccggatcgcgcagaggcgttatatgactatttcgtcgaacgctgccgtcagcaagagatgaacacgcaaacaggacgcttcgctgcggatatgcaggtaagcctggtcaatgatggccccgtgacattctggttgcaggtatgagccagcttccagggttgagtcgggaaacaagagagagtatcgctatgtatcaccttcgggttccacaaacagaagaagaattagagcgttactatcagtttcgctgggaaatgttgcgtaagcccctgcatcaaccaaaaggtagcgaacgcgacgcgtgggatgcgatggcgcatcaccagatggtcgtcgacgagcagggtaatctggtggcggtaggccgactgtatattaatgccgacaatgaagcgtccattcgctttatggccgttcatcccgacgtgcaggacaaagggttaggcacgctgatggcgatgaccctggagagcgtggcgcgtcaggaaggcgttaagcgcgtgacctgtagcgcccgtgaagacgcggtggagtttttcgccaagctggggtttgttaatcagggagaaatcaccacgccaaccaccacgccgattcgccattttttgatgattaagcccgtcgccactctggatgacattctgcatcgcggcgactggtgcgcgcagctgcaacaggcgtggtacgaacatatcccgcttagtgaaaaaatgggcgtgcgcattcagcaatataccgggcaaaaatttatcactaccatgccagaaaccggcaatcagaatccgcaccatacgctgtttgccgggagtttattcagtctggcgacgctcactggttggggacttatctggctgatgctgcgtgaacgccacctcggcggaacgattattcttgcggatgcgcatatccgctacagcaagccgattagcggtaaacctcatgcggtagccgacctcggtgccttaagcggcgatctcgaccgtctggcgcgcggacgaaaagcacgggtgcagatgcaggtcgaaatctttggcgacgagacgccgggtgcagtgtttgaaggcacgtatatcgttctgcccgcgaagccatttggcccgtatgaagagggcgggaacgaagaagagtaactgatggagaggggcggtgctgcctctctcattcaggtcatttatattagtccttggctatttcggttatattaaataagaactctataaatttttattcttcgttggctccatacgtgtcttgctacatcactgttcaggagcatttaaatattatttgtagaactgagtggcaattatcgcagataatgcttaattcatcatcttagttcatgtttgagcgatttttgatagtcaaaaccccctctggtgccatacttttctcataaatatttttaaaatctatagctaacaaatattatgcaaagataatggactagcatcattgtcagtatcattcatttactgctctgtatgttatgaataattatgttgtatgtttgctcttaaaccgtgggaaggaggctataatggttgccaatattaatctcattaaacaagaaagttattctgttgttaatttagaaaaacaactttcccgaactgttaccaacaaaattataacgatgagcaagtaaagaccggttggtggcagtactgaccggtctgtgatgaaagattaatttcaccttaaatcctggtgctgttaggatgctgacgtttttcggctacaccattcagattatgcaaataaatatctctgaatataatatattcatagcacccataattcatcctgggcgataactaaaccatttttgagtaataaatgaaacaactgcaacactcttattatttctggaaaacgcctcgcaaaaacaaaacaacatgcaaaaatccgctttttttaaatgattttccggcgtaattttcgcacatacattaatgagtaatatatgtaaggtattggtaatggcgatgaatacggtttttcttcatttaagtgaagaggcaattaaacggctgaacaagcttcggggctggcgtaaggttagtcgatctgcaattttacgcgaagcggtagagcaatatctggaacgtcagcaattcccggtgcgtaaagcaaagggaggcaggcaaaagggggaggtagttggtgttgatgatcagtgtaaggagcataaggaatgacaaaaatttttcattcttgaatataaaaaacagatgcccttattctggtattaatacaaggctgttttacttgaacttataataactgcaactgttacatcatatctggaaaacgcctcgcaaaaataaaaaatgatgcgtaaatgagctttctttaaagattcggcaagggtacttttctctccatagattcaaaaatgatattggcgagatatttatgaactctctggcaggtatagatatgggcagaattttactcgatttaagcaatgaggtgattaagcaacttgatgatctcgaggtgcagcgtaatcttcctcgtgcggacctattaagggaagcggtagatcaatacctgataaatcaaagccaaacagcaagaaccagtgttcctggcatctggcaagggtgtgaggaagatggtgtcgaatatcagcgtaagctgcgcgaggaatggtaatgggaaaaaatgatgtcaatcagattgctgacaacgtgcgcgttgttcatgccggatgcggcgtgaacgccttatccggcctacaaagtcgtataaattcaatgtattgcagtttattggtaggcctgataagcgcagcgcatcaggcaatcttacgcttgtcatcagtctcatgcccataaccttattgatgtggtggtgggtaaattgaggccaaaccggcactggcggcatagcttgaggtggtaacgcggaatacgagagatggtgtcgtcacaccctatgagctgtaatccgggcgacctgcgccacccggaaaacgtcagagattactctccttcacccggaaacaggaacgggttgatggaactgcgggcatagccttcttgctccattcgtgcgtccagtaccagagaggcgaggtcatctgctacggcttcgatttttggatctttttcctgatagagaattttcaggtaagtgtcgcagtcatcgcagctttcggctttaatcgcggcctgttcgtcatccaggctccagtaatgcagtttgccgctctgctcgcagttgctgcattttacgcgcactacgtgccattcagtttcacacaggttgcagtgcaggtaacgtagcccctgagtggtgccaatttgcaccatgctggacaccggcatagaaccacaaaccgggcaatattgacgttgctcgccgtattcagcgcgggctttgccggggatcagattggccatctgcgcccagtagaggctcagtgcagcccagataaacggcgctttatcgctgctgacggagctgaaatcagaggcaaacagcgcgctggccatatcttccagctcctgagtgcttgccttctccagattctcaatcactgccagcgccgggccgctcatttcaggtttcagctcagcaatcagcgccatcagcagcttttgccagtgcttatcacgcggcagaacgtgaatatccagcgggggcttgccttgtgcgctggcttctttaatgcgcgcagtcagatccatctccagcggatggtcgtacagcaccacttcctgggcgtgggcgataagcgcagcaaagcgcaggtaatcacccagaggattattttctgccagctcgcgcagacgctcggcgcggcggttgtataaattcttgagccgagggaacaataacggcggaatcatatccgccgtacgtttctcgctactacccagctcatcttgcgggattatgcgaatactcattcagctttcttttccgttgtcttgcggacctcacggtaccagcgcgggtgatgtttcttcgcccaggcgctggtaacccatccttccaccatggcggtaatcgtgcctttcacccaaagggcggcgtagatatgcaccatgataaccacaattaacgccactgcggcaaaactatgcagcattaacgcgaatcggatcaccgggatactgaaagcaggcgcaaaataaggacgccagataatcacgccgctcaccagcagcagaaccaggaaaataatcgccgcccagaaaacgcatttctgaccgaagttataacgcccggtgtcacctacttcctcgttgacgacgatcttacgaatattcttcgcccaaaagatatcatcccgattgattaggttgtgatgccagtaacggaaaaacatgatgatgaagctggcaaacataaccacgccgacaaacgggtgcagaattcgcgccagctgcggtgtgcccatgatttgcatcaaccagttgaaggacgggaacaaaaagcccagcccgctcaccgccgccaggatgaagcagaaggcggtgatccagtggttgatacgttccggcgcggtgtagcgcacgatggtgtcacgtcgtttcatttgcgctcctcgtctttctcttcgtgcagattattctcttcctcatccgcacggttcggaccgacacccacgtagtggaagatactggccgcaaaggtagccgcaaagccaacagccgcgagcggtttccagatgcctttccagaatttcacggtttcgctgatttccgggttctccggcaagccatgatacagatttggcttgtcagcatggtgcagcacgtacatgacgtgtgtaccaccgacgcctgccggatcgtacagacccgcattgtcgtaaccgcgggttttcagctcagcaacgcgctcgctcgccagcgttttcatgctctctttcgtaccgaagtgaatcgcgcccgttgggcaggtcttcacgcaggctggttcttgcccaaccaccacgcggtcaacgcacagcgtacatttgtagacgcggttgtcttccgggttgaggcgcggaatgtcgaacggacagcccgcaatgcaataaccgcagccaatgcactgctcggactggaagtcgacgataccgttggcatactgaataattgcaccttccgccgggcacgctttcaggcagcctggatcggaacagtgcatacagccgtctttgcggatcagccattccagtttgtcgttctgctccacttcgctgaagcgcattaccgtccagcttttggcgcttaaatcattggggttgtcgtacaccccaatgttattgccgacggtatcgcgaatgtcgttccactcactacacgccacctgacaggctttacagccgatacaggtggtaacgtcgatgagtttcgccacttcttcctggaagtcccgcgcctgaggcgcgggggtcagaccgttagtcgcggaacgacgaatgatatcttgagattgataagccatatgtcgtctccgttacaccttttccacattcacaaggaaggacttaaactccggcgtctgcgtgttcgcatcaccaacgaatggcgttaaagtattggcaataaagccttttttagctacgccttcatagccccagtgaatcggaataccgatggtatcgatatctttgccgttcgctttcagcgtgcgaatacgtttggtcaccaccgctttggctttgatatagccacggttggaggagactttcacggtatcgccctgggcaatgccaagtttattcgccaggctctccccgatttccacaaactgctctggctgcaaaatcgcgttcaacagcgcgtgtttggtccagtagtggaagtgctcggtcagacgataggtggttccgacatacgggaacttatcggctttacccaatgcttcggcgtcgtctttaaagatacgtgcagccgggttgctgataacgtttggatgcagcgggttagttcccagcggcgtttcaaacggctcgtagtgttccgggaacggaccttccgccatcttatcgagggcaaacagacgccccatgccttcctgctgcatgataaacggcccgacgccgctacccggaggcgctgcgctgtagtccggaatatcccagccggtccacttagtgccgtcccatttcagcaactgacgcttcggatcccacgggttaccctgcggatctgcggaggcgcggttatacagaatgcggcggttaagcggccatgcccatgcccagcccagcgtgttaccgaggccagacggatcggcgttatcacggcgtgccatctggttgccttccggcgtccagctaccggcgaaaatccagcagccacaggaggttgtaccgtcatcgcgcaattgggcgaagctactaagttgttggcctttcttgacgataaccgcaccggttgccggatcggtaatatcggccagcgccttaccgttgctctccatcgccacttcttcactagatggctcatgcggaatggcgtagttccatgtcatgttcagcacctggtccgggttcgcgccaccctgttcggcatacatcttgcgcaagcgcaggaagataccggagaggatctcgccgtcagtcagcgcaatccccggggcgtccgcacctttccagtgccactgtaaccagcgaccactgttaacgatagaaccgttctcttccgcgaagcaggtgcttggcagacggaacacttcggtctggatcttgctgctgtcaacttcgttcagctcaccgtggttctgccagaagttagaggtttcagtgttcagtgggtcgatggtgacgaggaacttcagtttgctcagacaaccgatcactttgtttttgttcgggaaactggcaacagggttaaagccctggcagatatagccattgaccttgccctctttcatcatctcgaagtattgcaggacgtcgtagcctttatcccacttcggcaaccagtcaaagccccagctattttccgccgtcgctttatcaccaaagaaggccttcatcatagagacgaagaatttcgggtagttgccccagtagtttacctggccttccagcagcggttttggcgtgttggcggtaaggtaggtttgcagatcggtctgcttctcgcttggcagcgtcatgtaacctggcaggctctggctcagcagccccaggtccgtcagcccctgaatattggagtgaccgcgcagggcgttaacgccgccgcctgccatccccatattgccgagcagcagctggatcatcgccatcgtacgaatgttttgcgcaccaacggagtgttgcgtccagccgagggcatacaggaagctggcagttttatcgtgagcactggtttctgcgatgtattcgcagactttcaggaacgcgtcttttggcgtaccacagatgttttcaaccacatctggcgtgtagcgggaaacgtgctgtttcagcaagttccacacgcagcgcggatgttgcagcgtggtatcgcgtttggcgaagccgttttcgtccagttcataagtccaggaggatttatcgtacttgcgtttttccgcgtcgtagccggtgaacaggccatcttcaaagccgtaatcctcacgcacgatcaggctggcgttggtataggcttcggtgtattcgcggttgaatttttcattgttcagcaggtacagcaatacgccactcaggaaagcaatgtcagtaccggaacgaataggggcatagtagtcagctaccgccgccgtacgcgtaaagcgaggatcgatcacaatcagcttcgcgccgttgtgaattttggcttccatcgcccagcggaacccgaccgggtgagcttcagcggcgttaccgcccatcaccacgacgaggttggcgttcttgatgtcgacccagtggttggtcatcgcaccgcgaccaaatgttggagcaagacttgctaccgttggtccgtgtcagacacgcgcctggttgtcgaccgcgagcatacccagcgcgcgggagaatttttgcgttaaatagccggtttcgttactgctcgcggaagcacacagcatcccggtggagagccagcggttaacagtcacgccttcggcgttttgcgcaatgtagttagcatcgcggtcttctttcatcagtttggcgatgcgatcaaacgcctcttcccaactgatttgctgccatttatcagaacctggcgcacggtattccggaaacttcagacggctttcggagtggatgaaatccaccaggccagcgcctttcggacaaagtgcaccgcggttgaccgggtgatccggatcgccttcgatatggaagatagatgctttggcgttttttgctccgtcaccgaggctgtacatcaacagcccacagcctacggaacaataggtgcaggtattacgggtttcgcgggtgcgcagcagtttatactgccgggtttccgcgagtgctacgctgggtgcaaaacccagtgccgctgccgtggtgcctgccataccgccagcgcagatcttaaagaactgccttctgctgacctgcatggattgctccttgtttcgacattgtcacgtcccatttacattcgcttgctgcgtgtgcagggagtgggagttatttttctttgcggaaggggccgcaaaggtccagaattggctcaatttccctccatccaggaagggtttgtaacagaataccataatgttggtgtgtgtgttcttatctggttaagagaaagtgaaaaaaacacagcgaaaagaaatcgaaaatgtgacaaatatcacaggtgttcgtcaaattgagttatggcggcgtgatgatttacaacacccacggttagatgaggtcgcggaagaagttcccgttgcgctggtctacaacggcattagccatgtggtgatgatggcgagccccaaagaccttgagtactttgcgctcggttttagcctttccgaggggattatcgaaagtccgcgcgatatcttcggcatggatgtcgttccttcctgtaatggtcttgaagtacaaattgagctttccagccgccgctttatggggttgaaggagcgccgccgggcgctggcgggacgtacgggctgtggcgtatgcggcgtggagcaacttaatgacatcggaaaaccggtgcagccgctaccgttcacccagacgtttgatctcaacaaactggatgatgcattacgtcatctcaacgattttcagccagtggggcaactgactggttgtactcacgccgctgcctggatgttgccatctggcgaactggtcggcgggcatgaagacgtgggtcgccatgtggcgctggacaaactgttaggccgccggagtcaagaaggggaaagctggcagcaaggtgcggtactggtttccagtcgtgccagttatgaaatggtgcaaaagagcgcgatgtgcggcgtagagattttgtttgcggtgtctgccgcgaccacgcttgctgtagaagtggctgagcgctgtaatctgacactggtaggtttttgtaaaccgggtcgggcaacggtttatacccatccgcagcgtttgagcaattaattaaaataagtcctgcgaaatatattaaattgcaggacttattcatttcgtgaattttattattttatttataaacaaaatgcgtgtagtggcgttttcttttttcatttattatgttcactctcttatctatatatttataaggcaattaaatgaaaaggaatttattatcttccgctattatagtcgccatcatgtccctcggtctgacgggttgtgatgataaaaaagccgaaacagaaacgctcccgcctgccaatagtcaacctgccgcaccagctcctgaagcgaaacctactgaagctcccgttgcaaaagcagaagctaaacctgaaacacctgcgcaaccggtggtcgatgaacaagcggttttcgacgaaaaaatggatgtctatatcaagtgctacaacaagttacagatcccggtacagcgcagtctggcgcgttatgctgactggctgaaagattttaaacaggggcctaccggtgaagagcgtactgtttatggcatctacggcattagtgaatccaacctcgctgagtgtgaaaaaggcgtaaaaagtgctgtggcgttaacgcctgcgctgcaaccaattgatggcgtggcggtgagttatatcgatgctgccgtggcgttgggtaataccattaacgaaatggataaatattacacccaggaaaattataaagacgatgcgtttgcgaaagggaaaacgctgcaccagacattcttaaaaaatctggaagcctttgaacctgtagccgaatcttatcatgcggcgattcaggaaattaatgataagcgtcagcttgcggaactgaaaaatattgaagaaagagaagggaaaacattccactactactctctggcagtcatgattagtgcgaaacaaattaataacctgataagccaagataagtttgatgcagaagcggcaatgaagaaagtgtctgaactggaaacgctagtggcgcaggccaaagaagcggataaaggcggcatgaatttcagctttattaatagcgcaggccagtatcaactcgaggctaaaaaatacgttcgccgcatcagagataaagtcccgtactctgactgggataaagagcaacttcaggacgcaaacagtagctggatggtcgaagactctttcccgagagcattacgcgagtacaacgaaatggttgatgactataatagcctgcgttaaacgtttttgatgataaatgcagtgtcggatgcggcgcatccgacacagttcaccccttgtgaagtaactccataaatgcctcatatcctgttaacccggcaataatctccgccggatgctgacacaatatgcttgccagatagctaaatatttttagctcatgacgcgcatcggcggcggcgcaggcgatcaagacatggttaatgacttcgttattcacctcaactggttgggcgagggtaataaaaaatccacgaaaacgtcgctcctgttcgctccagcaatgtgggatggcgaggcgattaacaatcaggttttcaccttcgccttcgcgggcgatgatgcgttgtgcttcatcggcggtaatatggtgttgtgcgactaattgcgcacaaatttgccgggtaatatgttgccagctttcaccgcgtacattgctataatgaaaacttccgggggcagagaaaaaacgctccggctgttggcgaataaatgccgtcgccagaaaatgttttatttgttcgataccggcagccgtaatgatattttttacggtgatgtaattatttaccgcgtcatccagtaaataatggctgttgttaatgatcaataacggctcaatctcttcgcgaatggcaacaagttcgcttaagctacgggcaataattacccgacaatttaaaacatcgcgctcaatggcgagctgattaatagtggcaatcgcgttctggtcgctgagcaaaatgatcggctggcgttcgttttgatgccgctccagcgcacaggcaaaatacaaaccgatcagatcgctgtcgaaaaggggaatatcgagctgttcacgcagtagcgtaataaagtgcagactcatatcaaaggccgcaggccaggcggctttcaggttattcatgctgctctggcggtgctcagcaatccacactggtgcggcaaggcaacgtaataaatgcccggtaatattctcaaccagctgcgcatcaataatattcaaactcgcgatgcccggcaccctttgcagcaacccctgcacattatcggcactaattacctgcgcttgctgatgctgtttctctatcaaacccgtcagggttcttacagcgttatcaccaagaaacagaccgctatgttcaacgatttgttttatctcgtcaccgggatattgcggccactcatcggtcagttgattacgcagggcgtaaatcgccagaatcaggctggagagataatcaccctgcatgagcggccagcggtgttggttgtcgcaggccgtggataaatgctgaaggttgtctcgtgttatgcccgccagcggaattaaaaacggatctttgcgcagcaagttcgccagcaagataacgcgtttctcttctgtctcatcaatgaaatggcccaaaccagggcggctggccaggcaacaagtgcgttcataacgctgttttaaccggggcagacgctctgctacccacgtttctggcaaattaagcgcgctggcgagttgcgcacggggagtgaaagtattcagtaataacagcgccagcagccgatcgtcgttatcgtgcttttgcagcaactgaaaaaagctgcggcgctcgaagatttccagctgatagcccgcactgccactggcgaaaatgcgggctttgccgttaagggtgaagttgagatagtcaatatcacgcaggatggtcctgccactaacgccagtctgttgcgccagctcgccaggcgtgcgcggctgttgctccagcagatcgacaatctttaactggcgttcgtttagcattaatccacctgacggaactggctaaacgcgttgactttctccgcagttaaggtcgtcagaaaaccccgtatcagcgtgagcagagcttcgtaatcggctttactaatcataccgctgttggcgtgcagataacgagttggcagacacagcgcgacaaccggacgcccgccgcccatcacgttgtagcgcccgccatccgtcgcaccggttttcatggtggaaaattgcagcggtaaatcgttatgtgcggcacagctttttaacgctgctaccagtttctggttggggaagtagcgcttgtcaaacagcatcagccccggcccctggcccagtttcagcgggtatttaatgttatcaatgcccggaacatcgcccgctacggcggtatccaacacgatcacgacgtccggtttaatgtgttccgcgctggtttgcgccccgcgtagcccaacttcttcttccacactgccaacgccatacagcgtaatttcgggattattcaccgtctgcaatagttcagccatcattgcgcagccgatgcggttatccaacgccttgccgaccactttatcttcgccccagcaggcaaaattggcttccgggctaataaaattaccaatttccacgccgcgcttttccacctcttcgcgactgttcgcgccaatatcaatgaacatctcatcaaaactcagcggttgttgcttttgcttttccgttaacgcatgaggcgcgacggaaccaatcacaccagggattttcactcccttgtgtgtgcgtatggttacccggtggttgagcatgctctgattccaccagccgccaatggtggtaaaacgcagaaaaccgctctcgtcgatgtgggtgaccataaagccgacttcatccatatgtccgacaacggcaacttttggacctttattccccttacgggcaacaaagctgcccagaccatcgaaggtgatttcattcacgcaaggttccagcgtgtttatcagaatgtcgcgaacttcctgttcatcgccgctgacggcgctggcttcgcacaactgttgcagtaactcaatgttcatggacaagctcctgttgcgcggctttcgctttgcggcgtaaccacaatcctttcaggacgataatgaaactaatgttcagcgcgaggccaatcgccagcaccagataaaagctacccaccgggctcatcaggccgatcagcgggtcaaagatacccaaaccaggtgccagacgtttgattccgaaagcgatcaccagcacgccggtaatgccgcccgccagcgtattggcggtaatcatcggcaacggagctgccagagcgtaaggaatagccggttcggttgcgactgtggcaccgaccacaatggcactactggcagcctctttttcctgtcgggtaaacagtttgggcgcaatgaacgtcgcaagacccgccgcgacgggcggcatcagcgcgacaacgccgacgatggcgtaccagtcataaatgtgtttttccagcagactgaagcagaagaaccaggcggttttattgatggggccgcccatatcgaacgccagcatcgcaccgaccagaaacgctgccgcaaacttcatacttggaggaatggtattcaggaagtggagcagcccgcccatgaggtcggacatcaccggcccgataacgtagtaagtgagcacgccgaaaaccagcagagtaacgaacgggatcagcatactaccgagcagcggttgtaatgctttgccaaggcgcactttgcggaaccagaagacgaaatagccaatcgccagccccagcaccaccgcgccgaggaatcccgcaccgctctgggtgccgagcagcgctttgtcgttcgccagatagcaaaccagaaacgccggagcgaaagccggtttatcggcaatgctgctggcaatataagcgcccatgatggggatcataaaggtgaagccaaggtaaccgatggattcaactacccaggtaaagctcggcgcgcctttgctcatatcggtatacggcaaaccgaactgcaccagcatgttggcaagcgccaccaggataccaccgccgatgacaaacggcagcgccgcagagacgcccgccatcaggtggctcatcacgctaccgctttgcacttcctgtttgccaagcttcacgccgctatctgcggcaaaaagctggctgtttgtcggtaattcgctgaaaatctggtcgatatttttcaacgcctgggagatggcaatctcataaactttcttcccggcaaaccgcgcgcgatcatcaccgctcaggccacgcccggtagcgagaatgacgtaatcggcagcggcaatctcttcgctggataagcggttttcaacgccactggacccttgagtttccacttttatggtatgaccgagagaacgggctttctgttccagggcttccgccaccatgtaggtgtgagcgatcccggcggggcagttggtgatcgcgacaatacgtaaggaactctccatcgccacttccttaactgctgagggtttgatttaacaaggcaagcacctggtcggtatcgccctgttgcagttgatgaataaattccttgtgaataattttgcgacacagtgtgccgatgattttgacctgatcctcttcgccgctttgcggcacgccgaggcagatccagcaattgacgtcttcgccatcgctggctttccagtcaatagcctgcgctttgcgggcgaataatacgaacggttgtttaacgcaggcgcttttaccgtgcggcacggcgacaccggaaccaaatccagtagagtgcattttttcgcgcagcagcagggtttgcaggaactggtgactgtcggtgataaaaccgttttgtaacgctattgtcgccaactgcttcagaacggaataagcgccattgccctgaatattcaggtcaatacagcttgcagtaagagctgccattaatcggactccataaaatatattttaatcaattgtaatggtggagcgattaagtgatgagaggcgatatgtcggtaaacaatgacaatttgagacagagtgaaaggtcagatttgcggagtaatgcacataatggttatttaaataaaccacatgaatcattaatgggttattcattatttttgtgatttactcacaatgtatcagggaaatataacttaccgggagatgtaatatgtttaatttttcaaatcgaaatttaaaatattgtgccggaggcatctctggcacattgggcaattacggcaggtaaaacacttcttgcagctcgctactcaccgggctgttatccgggttagcgggcataacatcggtcatatatttccaccaacgttggcagacatcagtgctggcaaccgcattccagcgttcttcagattcaatctctaccatggcaaacagcagattacgcgctttgtcgagatagatggcgtagttatgcgcaccgtgagatttcagcactgcttccagttctggccagatgggattatgccgacgctgatactcttcgtgggcgtcggggtttacctgcatgacaaaggctttgcggatcatgtttgctccttacagcgccagcgcactggcgagtggcgtaacgccgaaacgcttgccgagcgctatcaactcttcacggctgatggtctgtttcatgccgcccatgctataaaccttcactaatacttgtgcacttttttctgcggtgtcgattaaaccgaaggtttcatccagcgtcggtccgctgccgaagacgccgtggaagggccacaacaccaggctatgtttttgcatctcttgtgcggtcgcctggccgatttcgtccgtgccgggcaccatccacggcaaaatgccaacgccatccgggaataccaccagacactcggtgctgccttcccacagttggcgagtgaagaccgcggtgtcgttttcaagtacataggtgagggcgatcaggttggtggcgtggcagtgcatgatcacccgatctttgccgttggtggctttaatgcgctcgcagtgggaaaggaagtgagccggaagttcggaagtggggacggcttcgttggttaacccccaaagaatgtggtagcccgcgccgtcgctgtcgacttttacgatgcctaagttagccgcaggatcaagctggacgttacggaagaatttgccgctgccggtgacaataaacggtgtatttgccagtaaaggcatgggctggctgagcgggatatagcgcggttgttggtggaaattgtcgtgatatggtgcgatatcggcgtcatccaggcgtagcgtcaggttgccgccgttgcgctcatcccagcctttcagccaggcgtcggtggtggctttgatcattccctggacaaaccaggactgagtaatgttttgcatgttctgtgttcctgtaaattcggtgttgtcggatgcacgacccgtaggccggataaggcgctcgcgccgcatccggcaatcaatgcctgatgcgacgctgtcgcgtcttatcaggcctacaactattgccgacctgtaggcctgataaggcacttgtgccgcatccggcaatcaatgcctgatgcgacgctgtcgcgtcttatcaggcctacaactgttgccgacctgtaggccggataaggcacttgtgccgcatccggcaatcaatgcctgatgcgacgctgtcgcgtcttatcaggcctacaactattgccgacctgtaggccggataaggcacttgtgccgcatccggcaatcaatgcctgatgcgacgctgtcgcgtcttatcaggcctacaactgttgccgacccgtaggccggataaggcgctcgcgccgcatccggcagtgtttacccgcggcgactcaaaatttctttctcataagcccgcacgctctccagccattcgctacctgctggcgtatcgtgacgttggcaatacatttcccagaccgcctgccacggcaagcttttctgctcttccagcagtgccagacgcgcagtgtaatcgcccgccgcttccagcttgcgcagctcagcggtaggttccagcaacgcacgcagcagggcttttttcatattgcgtgtaccaatgacccacgcggcaatgcggttgatagaggcatcgaagaagtcaaggccgatatgcacccggtcaaacagatcgtgacgcacaatctcactggcaattgcctgggtttcatcatccagcagcactacgtgatcgctgtcccagcgaaccggacggctgacgtgcagcagcaactgcggcacatacagcatggcggcggaaatcttgtcggaaatcacttcagtcgggtggaagtgcccggcgtccaggcacagcgcagtctggcggctggtggcataccccatgtaaaactcattggagccaaccgtgtagctctctgcgccaatgccaaacaatttgctctcaacggcgtcgatatggtgcgcagggtttagcttctcgctgatcacctcatccagtgctgccagcagacgctgacgcggggcgagacggtcaacggtgatatctttcataccatccgggatccagatgttcatcacgcttggtgtgccgagttgctcgccaaaataggcgctaacgcgacggctggctttgcagtgatcaatccagaactggcgaatgctgtcgtcggcatgggaaagcgtaaagccatcggcgcttagcggatggctaaagcaggaggggttaaaatccagaccgagctgattggctttcgcccattcaacccagtttttgaagtgctctggtttgatctggtcgcggctgactggcgtatcactttccagatagatggcatgtaaattaagccgtttcggccccggaatcagccgcatagcctgttccagatcggcacgtagctcactggcattacgcgctttgcccggataattgcctgtggcctgaatccccccggtcaggctaccttccgggttttcaaaaccggaaacatcatcgccctgccagcagtgcatactaacgggtaaacgatcaagttggcgcagcgcctcctcgacatcaatccccaccgccgcgaaacgctgtttcgctagctcccaggcctgttccagttgagtggtcatgcgcaaagctcctttgtctgtcgtgtagagtgaatctgcgccacatagtgggcaatttcactgtcaggattaggggtaaaggtggtcagattcgcggtggtgctgacgacctgacggaaatcatccacattgttgagttcatccagcgtcattaactggatgccgatattgccgagcgtgctggcttcaacaggcccggcgatcacccgaataccgcaggcatcggcgcatagctggttgagcagcgtgttctggcagcctccgccgacaatatgcagttggctgaaatcttcaccgcgcagctgcgccagctcatgcaacacatcggcatacagcagcgccagactgtcgaaaatgcagcgcgccagttcagcatcactttccgggatcggttgcgccgtttcccgacacgcagcctgaatttcgctgcacatcgtctcaggattaataaagcgatcgtcattgggattgataatgaagcggcaagccggaagtgcctgtgtcgcggagataagcgccggaagatcgttgatttgctgctcctgaagcactcgctgaagcagccataagcccataatatttttcagcacccgatagcgaccttccgccccgccttcattggtgatgttggctgccagtgccgtgtcattggtaaatggcgtctggctttcgaagcccatcaaactccaggtgccagaagagagataagcagcacgactgccgtttaacgggctggcgataaccgcgctggcggtatcatggctggcaacggcgaccactggaatctcattaccctgcgggcaaatccagtgacctatgacattacccggatgcgtcgggcgaccaaaccaggctttgttggccccgctccacgccagtaggctctcgtcccagtcgtcgctattgatattgaccagttgcgtggtcgtggcgttggtatattcccagttcatcttgccggtcaggcgataactgaagtaatccggcatcagcagagcgtgagcaatgtgtggaataagttcaggttgttgctccgtcagcgcacgcaactgataaagcgtattgaagggcagaaactggatgccgctacgttgataaatatcgcgtttgccgagttgttgttgtgcctgcgccattaggccattggtgcggctatcgcgataagcaacgggcaggcccacacgctgaccctgttggtcgagcagcacaaagtccacgccccaggtatcaatcccaatgctatcgatacgaatcccttcctcgcacaccttgtttaatccaaggcgaatggcactttcaaggctatccacatcccaggtgacatagccgttctgactatgcagcccattgttaaaacgatggatttcgcgcagcgtcaggctgcggcattcacgctcgtaacgcgccagcatcacgcgcccactggatgcgccgagatcgacggcgacacaattgcgaaaggtcataatgtgatcctgctgaatttcattacgaccagtctaaaaagcgcctgaattcgcgaccttctcgttactgacaggaaaatgggccattggcaaccagggaaagatgaacgtgatgatgttcacaatttgctgaattgtggtgatgtgatgctcaccgcatttcctgaaaattcacgctgtatcttgaaaaatcgacgttttttacgtggttttccgtcgaaaatttaaggtaagaacctgacctcgtgattactatttcgccgtgttgacgacatcaggaggccagtatgaccgtattacatagtgtggatttttttccgtctggtaacgcgtccgtggcgatagaaccccggctcccgcaggcggattttcctgaacatcatcatgattttcatgaaattgtgattgtcgaacatggcacgggtattcatgtgtttaatgggcagccctataccatcaccggtggcacggtctgtttcgtacgcgatcatgatcggcatctgtatgaacataccgataatctgtgtctgaccaatgtgctgtatcgcagcccggatcgatttcagtttctcgccgggctgaatcagttgctgccacaagagctggatgggcagtatccgtctcactggcgcgttaaccacagcgtattgcagcaggtgcgacagctggttgcacagatggaacagcaggaaggggaaaatgatttacccagcaccgccagtcgcgagatcttgtttatgcaattactgctcttgctgcgtaaaagcagtttgcaggagaacctggaaaacagcgcaagtcgtctcaacttgcttctggcctggctggaggaccattttgccgatgaggtgaattgggatgccgtggcggatcaattttctcttagtctgcgtacgctacatcggcagcttaagcagcaaacgggactgacgcctcagcgatacctgaaccgcctgcgactgatgaaagcccgacatctgctacgccacagcgaggccagcgttactgacatcgcctatcgctgtggattcagcgacagtaaccactttagcacgctttttcgccgagagtttaactggagtccgcgtgatattcgccagggacgggatggctttctgcaataacgcgaatcttctcaacgtatttgtacgccatattgcgaataatcaacttcgttctctggccgaggtagccacggtggcgcatcagttaaaacttctcaaagatgatttttttgccagcgaccagcaggcagtcgctgtggctgaccgttatccgcaagatgtctttgctgaacatacacatgatttttgtgagctggtgattgtctggcgcggtaatggcctgcatgtactcaacgatcgcccttatcgcattacccgtggcgatctcttttacattcatgctgacgataaacactcctacgcttccgttaacgatctggttttgcagaatattatttattgcccggagcgtctgaagctgaatcttgactggcagggggcgattccgggatttaacgccagcgcagggcaaccacactggcgcttaggtagcatggggatggcgcaggcgcggcaggttatcggtcagcttgagcatgaaagtagtcagcatgtgccgtttgctaacgaaatggctgagttgctgttcgggcagttggtgatgttgctgaatcgccatcgttacaccagtgatagcttgccgccaacatccagcgaaacgttgctggataagctgattacccggctggcggctagcctgaaaagtccctttgcgctggataaattttgtgatgaggcaagctgcagtgagcgcgttttgcgtcagcaatttcgccagcagactggaatgaccatcaatcaatatctgcgacaggtcagagtgtgtcatgcgcaatatcttctccagcatagccgcctgttaatcagtgatattagcaccgaatgtggctttgaagatagtaactattttagcgtggtgtttacccgggaaaccgggatgacgcccagccagtggcgtcatctcaatagccagaaagattaattcgccatgccgatgccgacgatgttagcggcgacaataatcaccacacaaccgaggctcaacaccgttaccggacggcgtcctgcattgttccactctttcagcaccagcccgacgataccgccgcacaatacatagaaactcatatgcagcatccaactgatgtagtcatactgcgccggaatgcgggcgtggccccaggcatagaaaaagaattgcagataccacatcaacccgcccagtgtgctgagtaacacattgtgaatgatcaggctttttgccaggctgaagtcggcttttaggctcaaatccttcacttttgccagacgaataaaacagaaaccgaggttaatgatcgcgccgccgcccatgatgacaacatagcttggcagagcgacatacagtggatcgacgccaagtgcggcagcggcttcatgcatcggttttgcggcgttcatcgcaaaggacatcccggcagagaaaatgccgcacatcaccgccagcaccagcccttttttcagattgaactcttcggctttaatgcccatcttgcgctctttcaactgcccggcgcgagttacaatccctacgccaatcagcgccaccagaacgccgagcaacgtcatgcgtccgccttcggtgctaatcaacacatcgaaattgccgttgataattggcgtcatcagcgtaccgacaatcaacgtaatgccaatggcgatgccaattcccatgctcatgccgagataacgcatggtcaggccgtagttgatattaccgatcccccacatagcgccgaacagaaaaacaggcagtcgcgtagagagactaaagctgctgtaatacgcccagaaattcggtagtaacagggcgctgatggcccacggcagaataatccagctaacaatcccaccgacactccacatggtttcccaactccatttttttacttttttgaacggagcgtaaaaacaggctgcactggccgcgccgatcaaatgccaaaatatccccatcgtaatcgcgttactcatcttcttatcctcatcatttttcgtcgcgtcacatctccgacgagatgagtgtaaaaatcgtgctgtcgattaacctttcgcctgttgccgccgttgtcgatttactggcaatcacggcattaagtgggtgatttgcttcacatctcgggcattttcctgcaaaaccatacccttacgaaaagtacggcattgataatcattttcaatatcatttaattaactataatgaaccaactgcttacgcggcattaacaatcggccgcccgacaatactggagatgaatatgagctataccctgccatccctgccgtatgcttacgatgccctggaaccgcacttcgataagcagaccatggaaatccaccacaccaaacaccatcagacctacgtaaacaacgccaacgcggcgctggaaagcctgccagaatttgccaacctgccggttgaagagctgatcaccaaactggaccagctgccagcagacaagaaaaccgtactgcgcaacaacgctggcggtcacgctaaccacagcctgttctggaaaggtctgaaaaaaggcaccaccctgcagggtgacctgaaagcggctatcgaacgtgacttcggctccgttgataacttcaaagcagaatttgaaaaagcggcagcttcccgctttggttccggctgggcatggctggtgctgaaaggcgataaactggcggtggtttctactgctaaccaggattctccgctgatgggtgaagctatttctggcgcttccggcttcccgattatgggcctggatgtgtgggaacatgcttactacctgaaattccagaaccgccgtccggactacattaaagagttctggaacgtggtgaactgggacgaagcagcggcacgttttgcggcgaaaaaataatcatttgccgcctgctgcaatgaggcgtataggccgcatatcagcttaaaaaatgaaccatcgccaacggcggtggtttttttgtgatcaatttcaaaataaaaacaatgatccgataaaaataaaacagcgtttcaattgatgtggttttgatcacttttattgattaaatgaatgtctatcttcgtttccatcaacactgatgctccattgaggaattacgcatcagcccttaaaaatatgccgacaggtgatggaaatgcagataaaacgcagcattgagaaaatcccgggggggatgatgctcgtcccgctattccttggcgcactgtgccacaccttcagcccgggggcggggaaatattttggaagtttcaccaacgggatgattaccggtacggtgcccattctggcggtgtggtttttttgcatgggggcgagtataaaattaagcgcgacgggaacggtactgcgtaaatccggtacgctggtggtaactaaaattgccgtcgcgtgggtggttgcggcaattgccagccgtattattccggaacatggtgttgaagttggattctttgccggacttagtacgctggcgctggtggcggcgatggatatgaccaatggcggactttacgcttccatcatgcagcagtacggcacaaaagaagaagctggggcatttgtgttgatgagcttggagtccgggccgctcatgacgatgattattctgggcactgccgggattgccagctttgaaccgcatgttttcgtcggcgcagtattaccgttcctggtgggctttgccctggggaaccttgaccctgaattgcgagaatttttcagcaaagcggtgcaaacgctgattccattctttgccttcgcgctgggcaataccattgatttgactgtgattgcccagactggtttgctggggatcctgttgggtgtggcagtaattatcgtgaccggtattccgttgattatcgccgataaattgattggcggtggcgatggcactgccggaattgccgcttccagttccgcaggggccgcggtagcgacacctgtgctgattgcagaaatggtgcctgcgtttaaaccgatggctccggcagcaactagcctggtagcgacggcggtcattgtgactagcattctggtgccaattcttacctctatctggagtcgtaaagtcaaagccagagcagcgaaaatcgaaattttaggtacggtgaaataaacctgcttccttaatccccacagccggatgaactaacgttcgtccggtttgctattgagttcctgcctggatacttaccgcgaaaacagcacgcctgacataaaataaatatggtctaatggggaaatttctcgtggagagggaacagatgcgatatccggttgatgtatacacaggcaagattcaggcttatcccgaaggcaaacccagcgcaattgctaaaatccaggttgatggtgagttgatgctgacggagctggggctggaaggtgacgagcaggcggagaaaaaggttcacggcgggccagacagagcgctgtgtcattatcctcgtgagcattatctctactgggcgcgggaatttccggaacaggcggagttgtttgttgcgcctgcgtttggtgaaaacctcagtaccgacggcctgacggaaagtaatgtttatatgggcgatattttccgctggggagaggcattaattcaggtcagccagccgcgcagcccttgctataaactcaattaccattttgatatcagcgatatagcgcagttgatgcaaaacacaggtaaggtggggtggttgtatagcgtgatagcgccagggaaagtgtctgcggacgcgccgctggagttggtttcccgtgtcagcgatgtgaccgtgcaggaggctgccgccatcgcatggcatatgccgtttgatgacgatcaatatcaccgtttactctccgctgccgggttaagcaaaagctggacgcggacgatgcaaaagcgccgactgagcggcaagatcgaagatttttcccgccggttgtggggaaaataacccccggagtgtaggcctgataagacgctatcagcgtcgcatcaggcatcctgctcaaatgccggatgcggcgtaaacgccttatcctgcctgcaaatgcgaagtttaactccgcttatacagcggcaaccaaatcaccagccgtaaaccgcccagcgggctgtcttctgccttcacccagccacgatgctgctgaatggcggtttcaacaatcgccagccccaaacctgtaccgccagattcacgatcgcgtgcttcatcggtacgatagaacggacggaaaatctgttcgcgatcttccgggctaacgccaggaccatcgtcgtccaccgtaatggtgataccgtctttatctaccgcaaagcccacttcaatcttcgtatgggaataacgcagagcattacgaacaatgttttccagcgcactttccagggcgttcggattgccgtacagcggccacggcccaggcgggaagttaactgtcaagctcttgcccatttgctcggcttcgaacgccgcgttatccagcacttcactccacaactggttggctttgatggtttcgctaaccagcgcgtttttttgctgattacgactcatcaccaacagatcgttgatcatgctgtccagacgttgcgcttcggtttcaatacgctccagttccttgctttcaccgctacgacggcgcagtaacgccgtacccagttgcagacgcgtcagcggggtgcgcagctcgtgagagatatcagaaagcagacgctgctgagaggtcatcatgcgctccagcgcggtgaccatctggttaaaactggcacctgcggcaaggaattcctgtggccccgcttccagttccgggtgctggcgtaagtttccctgggcaacttcatcggcagcgtttttcagcttacgcgccggttttgccagactccaggccaaccacaacagcagcggcgtactgaccaacatggtgacaatcagcagtaatagcgggcggtcaaacagtaagttaatgaaatcggattgagaactgctggccggacgaatcagataaagttggtaattatcttcgccatcacgcacggagaacggaccgaccagttccacgcggccatactttttcttctgcggatgatcggcgttatcggcctgaccaataaagttacgaatgatctgcatttcgctgcgttcagcgccgatcacgcggccttcggtggtcaccaataacaaacgctgtcctggcggtgcccacttatcaatcgcccggaacagacgccgccaccacattaaatcgttgggcggatcgttcgccagctccgcttcgacatgctgctcaatcatcagcccctgacgctgttcgctatccagaagctcggtcatctggcgactatcgagcttgggtaacatcaaaaccaacatcaacaccagcgccagcgtcagccagaagatggcgaagatgcgcgcggttaagctgcctatcatgaagcagaaaccatcagatattagctcaactagcagaaaccatcagatagccgcgaccacgcaaggttttaaaccacgggtgaccatctttacgatccggcagtttacgacgcaggttggaaatgtgcatatcaatagcgcggtcgaaaggcgtcaggcgtttgcccaacacttcctggcttaaatgttcacgggaaaccacctgacccagatgctgtgccagcaaatagagcagggtaaactcagtaccggttaactccagcgtttgcccgtcgaagctggcttcctgacggcctggattcagcactaaggcatcaacttccagtgtcggactaccgttgtcgttgttttgctgttgctcgctccagtggctacggcgcaggatcgcgcgaatacgtgccaccagctcacgatcattaaacggtttcgggagatagtcatctgcgcccagctcaaggccgagaacgcgatcaagttcactgccgcgcgccgtcaacataatgacaggcgtctggtgtgtctggcgaagtgcttttaatgtgtcgataccatttttcttcggcatcattacgtcaagcaaaagtaaatcaatgctgtcgtccagaagatcaagcgcctgttccccatcgtgggcaacaatcacgttgaagccttccatctcgagcagctcctttaatagggaagtcagctctcggtcatcatcaactaacaggattttattcattgtttaaatacctccgaggcagaaattacgtcatcagacgtcgctaatccatgactttacgttgttttacaccccctgacgcatgtttgcagcctgaatcgtaaactctctatcgttgaatcgcgacagaaagattttgggagcaaatgatgcgcatagttaccgctgccgtcatggccagtacgctggcagtcagtagtttaagccacgctgctgaagtcggtagtggcgataactggcatccgggtgaagaacttacgcagcgcagtacgcagagccatatgttcgacggcataagtttaaccgaacatcagcgtcagcagatgcgagatcttatgcaacaggcccggcacgaacagcctcctgttaatgttagcgaactggagacaatgcatcgccttgtcaccgcagaaaattttgatgaaaacgctgtgcgcgcacaggcagaaaaaatggcgaatgagcaaattgctcgtcaggttgagatggcaaaagtccgcaaccaaatgtatcgcctgttaacgccggagcagcaagcggttttaaacgagaaacatcaacaacgaatggagcagttgcgtgacgtgacgcaatggcaaaaaagtagtagcttgaagctattgagtagtagcaacagtcgttcccagtaataaaccctgttttccttgccatagacaccatccctgtcttcccccacatgctgtgggggttttttttatcctcaatttgcctgctgcttaatgcattgcagatgatttgcttccgttatactagcgtcagttgatagcgggagtatttatgaatcaatcttatggacggctggtcagtcgggcggcgattgctgcgacggcgatggctagcctgctattgctgattaaaatttttgcatggtggtataccgggagcgtgagtattctcgccgcgctggtggatagcctggtggatatcggcgcgagcttgacgaatttattggtggtgcgatattccctgcaacctgccgacgataatcacagctttggtcacggtaaagctgagtccctcgcggcgctggcgcaaagtatgtttatctccggtagcgcactattcctgtttttgacgggtattcaacatctgatatctccaacaccgatgacagatccaggcgtcggggttatcgtgacaattgtggcgctaatttgtacgattatccttgtcagctttcagcgttgggtggtgcggcggacgcaaagccaggcggtgcgggctgatatgctacattaccagtctgatgttatgatgaacggcgcaattctgctggcgctggggttgtcctggtacggctggcatcgcgccgatgctctgtttgcattgggaatcggcatctatattttatatagcgcgttacgcatgggatatgaggcggtacagagtttactggatcgcgcattgcctgatgaggaacggcaagaaattattgatatcgtgacttcctggccgggtgttagcggcgctcacgatcttcgcacgcggcagagtgggccgacccgctttattcagattcatttggaaatggaagactctctgcctttggttcaggcacatatggtggcggatcaggtagagcaggctattttacggcgttttccgggaagcgatgtaattatccatcaggacccctgttccgtcgtacccagggagggtaaacggtctatgcttagttaatcagtataaaagagagccagacccgcattttgtgtataaaataccgccatttggcctgacctgaatcaattcagcaggaagtgattgttatactatttgcacattcgttggatcacttcgatgtgcaagaagacttccggcaacagatttcattttgcattccaaagttcagaggtagtcatgattaagaaaatcggtgtgttgacaagcggcggtgatgcgccaggcatgaacgccgcaattcgcggggttgttcgttctgcgctgacagaaggtctggaagtaatgggtatttatgacggctatctgggtctgtatgaagaccgtatggtacagctagaccgttacagcgtgtctgacatgatcaaccgtggcggtacgttcctcggttctgcgcgtttcccggaattccgcgacgagaacatccgcgccgtggctatcgaaaacctgaaaaaacgtggtatcgacgcgctggtggttatcggcggtgacggttcctacatgggtgcaatgcgtctgaccgaaatgggcttcccgtgcatcggtctgccgggcactatcgacaacgacatcaaaggcactgactacactatcggtttcttcactgcgctgagcaccgttgtagaagcgatcgaccgtctgcgtgacacctcttcttctcaccagcgtatttccgtggtggaagtgatgggccgttattgtggagatctgacgttggctgcggccattgccggtggctgtgaattcgttgtggttccggaagttgaattcagccgtgaagacctggtaaacgaaatcaaagcgggtatcgcgaaaggtaaaaaacacgcgatcgtggcgattaccgaacatatgtgtgatgttgacgaactggcgcatttcatcgagaaagaaaccggtcgtgaaacccgcgcaactgtgctgggccacatccagcgcggtggttctccggtgccttacgaccgtattctggcttcccgtatgggcgcttacgctatcgatctgctgctggcaggttacggcggtcgttgtgtaggtatccagaacgaacagctggttcaccacgacatcatcgacgctatcgaaaacatgaagcgtccgttcaaaggtgactggctggactgcgcgaaaaaactgtattaatgatttcggaaaaaggcagattcctttaccctgaaaccgatgacagaagcaaaaatgcctgatgcgcttcgcttatcaggcctacatgaattctgcaatttattgaatttgcaaacttttgtaggccggataaggcgttcgcgccgcatccggcatggacaaagcgcactttgtcagcaatatgaggcggatttcttccgcctttttaatccctcaacatatacccgcaagttatagccaatctttttttattctttaatgtttggttaaccttctggcacgctttgctcatcacaacacaacataagagagtcgggcgatgaacaagtggggcgtagggttaacatttttgctggcggcaaccagcgttatggcaaaggatattcagcttcttaacgttagttatgatccaacgcgcgaattgtacgaacagtacaacaaggcattcagcgcccactggaaacagcaaactggtgataacgtggtgattcgtcagagtcacggtggcagtggtaaacaagcgacgagcgtaatcaacggtattgaagctgatgttgtcacgctggctctggcctatgacgtggacgcaattgcggaacgcgggcggattgataaagagtggatcaaacgtctgccggataactccgcaccgtacacttccaccattgttttcctggtacgtaagggaaatccgaagcagatccatgactggaacgatctgattaaaccgggtgttagcgtgatcacgcctaatccgaaaagctctggtggcgcgcgctggaactacctggcagcctggggctacgcgctgcatcacaacaacaacgatcaggcaaaagcacaggattttgttcgggcactgtataaaaacgtcgaagttctggattctggcgcgcgtggctccactaacacttttgtcgagcgcggaattggcgatgtactgattgcctgggaaaacgaagctctgctggcagcgaatgaactggggaaagataaattcgaaatcgtcacgccgagtgagtctatcctcgcagagccaaccgtgagcgtggtcgataaagtggtcgagaaaaaaggtactaaagaggtggcggaagcctacctgaaatatctctacagcccagaaggtcaggaaattgccgcgaaaaactactaccgtccgcgcgacgctgaggtggcgaaaaagtacgaaaatgcgtttccaaagctgaagttattcaccattgatgaagagttcggcggctggacgaaagcgcaaaaagagcattttgctaacggcggtacgttcgatcagatcagcaaacgctgatttccccaggataattatcaaacccggtggtttctcgcgaccgggttttttatttgtcacgattttgcgttacccttgcatctctttgaggtacagggaaaaaaagatgaaaaaagcgggtcttctttttttggtgatgatagttatcgccgttgtggctgccggtattggttactggaaattaaccggtgaagagagcgatacattacgtaagattgtccttgaggaatgtttgcccaatcagcagcaaaatcaaaatcctagcccatgtgcggaagtcaaacccaatgccggatacgtggttttaaaagatcttaatggcccactgcaatatctgttgatgccaacgtatcgtattaacggtactgaaagtcctttgttgaccgatcctagtacgccgaacttcttttggttggcttggcaggcgcgtgattttatgagcaaaaaatacggccagccggttcccgatcgcgcggtttctttggcgatcaactcccgcaccgggcgtacgcaaaaccattttcatattcatatctcttgtattcgtcctgatgtgcgcaaacagctggataacaatctggcgaacatcagcagccgctggttgccactgccaggtggtttgcgcgggcatgaatacctggcgcgtcgggtaacggaaagcgaactggtacaacgcagcccatttatgatgctggcagaagaagtacctgaggcgcgggaacatatgggacgctacgggctggcgatggtacggcagagtgataacagttttgtattgctggcgacacaacgaaatctactgacgcttaaccgtgctagtgccgaggaaattcaggatcatcagtgtgagattttgcgttaaggcgaagagttaaggaaagtaagtgccggatatgaaatccggcacctgtcagacttaagcctgtttagccgcttctgcagctttaacgattactgcgaaggcgtcagctttcagagaagcaccaccaaccagcgcgccgtcgatatccggctgagcaaacagttctgcagcgttagacgcgtttacagagccgccgtactgaatgatcacttgttcagcgatgttagcgtcaactttagcgatgtggtcacggatgaatttgtgaacagcctgtgcctgagccggagttgcagatttgccagtaccgattgcccatacaggttcgtaagcgataaccgcaccttcgaatgccgcagcaccctgagttttcagtaccgcgtcgatctgacgtgcgcaaacttcttcagttttgcccgcttcattttcagcttcggtttcaccgatgcacagaaccggagtcaggccctgctctttcagcaccgcgaattttttcgcgatcagttcgtcagattctttgtggtaagtacgacgttcagagtgaccgatgatgatgtactgtgcgccgatgtctttcagcatagcagcagaggtttcaccggtgaatgcgccggacaggttcaggtccacgttttgcgcacccagcatgatgtggctgccttcagcttcgcgcttcgccatatcgatatacatttccggtggtgcgattgcaaccgcacagccagcaacacctgccagctctttacgcaggttagaaaccagctcgtgaaccatgtggcggctgccgttcagtttccagttacccatcactaaaggatgtcgcattttaattctccacgcttataagcgaataaaggaagatggccgccccgcagggcagcaggtctgtgaaacagtatagagattcatcggcacaaaggctttgctttttgtcatttattcaaaccttcaaggctttcagatagcgccagcttaatcggttcaacagcgaaggtcagccccttttcgccgttgtccgcgacaacataacgcagtgcaccttctgtctcggtgtaataacgtttgtttttccccgccgttagtaggctctgcagttttttctggctttgtgttttggtcattaatggggtgagtgtgcggatcaccgctgccatgtattcctgagctttcgctttcgcggctttttgctctggcccctggatgggtagccaggtcatttgaatgcttttgatttttaaggtaccgcgctccagcgctgtagaagcatacaagttctcattaattttacttgcagcacgagtgagattggctttgtcgggactgctgtcgatggcacgaaattcgttcagtggcaggctgggattctggctgttaaagtcttctcgaaactggctgatggagagatcgaaagtaggggctccagccagcagataaggcgcggtcgttgccgtatctggtgtttgtgcatgcgcctctgttgtaacggttaatgcagaacataagagaaaaaacagcgtacaccctggcttcattgacagtaccttttgttatgactggctccgattaaaacgatatctgtcgcccttgtcaaaagggtagaatcctggaaaagacaaccatcaaggaacttacatgaccatacagcaatggttattcagttttaaagggcgtattggacgccgtgatttctggatttggataggcctgtggttcgcaggcatgctggtgcttttcagtctggcgggtaagaatctactcgatattcagaccgcggcgttttgccttgtgtgcttgctctggccaacagcggcagtaactgttaagcgcttgcatgatcgcgggcgttccggcgcatgggcatttctgatgattgtggcgtggatgctgctggcgggtaactgggcgattttaccgggtgtctggcaatgggcggtggggcgttttgtcccgacgttgattctggtgatgatgcttatcgatcttggtgcgtttgttggcacacaaggcgaaaataaatatggtaaagatactcaggatgtgaagtataaagccgacaataaaagtagtaattaacctttaatatatctcttactgctatttttttccgggattgttatttccacgatgcaaatgacaatacccggaaaatccttctgaactcttcaccttaagcaatatcaaaaaaaatggtaatccataagatcattacttgtttgttcttcccttaacggcgcattattcttaagtcgtaatcgacagagaggcgaatatacagaggtgccctatgaaagatgtcgtagataaatgcagtactaaaggatgtgcgattgatatcggtacggtgattgataacgacaactgtaccagtaagtttagccgcttttttgccacccgcgaagaagcagagtcttttatgaccaaactgaaagagcttgccgccgctacatcctctgcagatgaaggggccagcgtggcctataagattaaggatctggaggggcaagttgagcttgatgcggccttcactttcagttgccaggccgagatgattatttttgagttaagtctgcgtagcttagcttgatggagttgctttagaaggagttaaacatggcttataaacacattggcgtggcaatttccgggaatgaagaagatgccttactggtgaataaagccctggagctcgccagacataatgacgctcacctgacgttaattcatattgatgatggcttaagcgagttgtatccgggtatctacttccctgcaacagaagatattcttcaattgttgaagaataagagcgataacaagctgtataaactgacgaaaaatattcaatggccgaagacaaaactgcgtattgaacgcggagaaatgccggaaacactgctggaaattatgcaaaaagagcagtgcgacctccttgtctgtggtcatcatcacagttttatcaaccgtttgatgccggcatatcgcgggatgatcaataagatgagtgcggatttgctcatcgtgccgtttatcgataagtaaccgcttaccagtaatgctccgctgtcatatggcccggtcggcgacgtaaatgtttcgtcatctgccgggtctctttcagcaactgttgtgtatcgcgcaccatctgtggattgccgcacagcatcacatggctggtttctttattcatcggcaggccaatcgtgctttccagttccccactttcaattaatgccggtatccgtccggtgaggctccccgctgccgtttcccgactgaccaccgtctgaatgcgcagttttccttcgtagcgtttttccagttcctgcatcagtggcaaatagcttaagtcggcggcataacgtgcggcgtgcaccaggaccagatttttgaagcgatctaaatctttacctagttgcagaatgcttaaataagggccaatcgctgtaccggttgccagcatccatagcgtttcgcagtgcggcacttcatcgagcacaaagaatcctgccgcttcgctaaccacctgcacttcatcgcctggtttcagtgccgccagtcgtgggcttaatttgccatcggggacggtgaccaggtaaaactccagatcgggattatcggggctgtttacataggagtaggcgcgctggacgcgttcgccgtcgatttcaaggccaagcttggtaaattgcccggcggtaaacggaagcacgggggcgtgaacggtgagactaaacagggcgtcggtccagttctgcactttagtgactttgcctgttacccaatcagccatgtttttctcctgttttgattgacttgccttatcttcgttctccgaacaaaaaaattccagtcccgaaggactggaaggctcaatcgatcaaatcaatcagaggatgtgcacctgcatttccgggtctttgcgatccagatagtggatggactgaatgcggcgaatggtgcgactcttgccgcggatcagcagcgtttcggtagtcgcgatattgcctttgcggctaatgccttccagcagatcgcctttggtaataccggtggcagagaagatgacgttatcgctgcgcgccatatcgcccaggcgcaatactttaccggcttcgatgcccatcgctttgcagcgtgccagctcctgctcgccaatgcgacgattctcttcgttgtcgcctttgacgtcatgacgcgccagcagacgaccgttcatgtcgccatctaatgcgcggatcaccgccgcagaaactacgccttccggcgcgccaccaataccgtacagcacgtcaacttcgctgtctggcatacaggtgagaatactggccgcaacgtcgccgtccggaatagcaaatacgcgtacgccgagttgctgcatttcagcgataacggcatcgtggcgtggtttagccagaatcgttaccgtcagttcgctcaacggtttgccgagcgccgccgctacattgcgcaggttatccgccagcggcaggttcagatcaatggtgcctttggctcccggcccgacaatcagcttctccatatacatatccggcgcattgaggaagcagcctttatcgcctactgccagcaccgccagcgcgttagcctggcccatcgccgtcatgcgcgtgccttcaatcggatcaacagcaatatctaccgcgtcgccgcgaccagtaccgactttttcaccaatgtagagcatcggtgcttcgtcgatttcaccttcaccaatgacgatggtgccgtcaatgttgacctggttgagcataatacgcatggcgtttaccgccgcgccgtccgcggtgtttttatcgccgcgtcctaaccatttgtagccagccagcgccgcactttcggtgacgcgggaaaattcgatggcaagttctcgtctcatagcaaactctaagcagtaaggaatggcgcgaagtgtagcacaggggaagggagggattattgatgtgtgcggggttgcccccgcacgtttcgggactaccggatgcggcataaacgcttcattcggcatttacattattcgtcgtgttcttcccacgccatcgcgcgtttaaccgcttttttccagcctgcgtaacggtaattacgctcagtggtttcgatgcctggacggaactcgcgctcaatcaccgctttctcttgcagctcgtcgaggttctgccagaagccaaccgccaggcctgcgagataggccgcacccaatgcggtgacttcgcgcacttccgggcgctcaacgcgggtgccgagaatatcggactggaactgcatcaggaaattgtttgctactgcgccaccatccacgcgcagggcgtgcagacggataccagagtcggcctgcatcgcttccagcacgtcacgcgtctgataagcaatagactccagcgtcgcgcgtataatgtggttagcgttcaccccacgagtcagaccgaaaatcgccccgcgcgcatacgggtcccagtacggcgcacccagcccggtaaatgccggaaccacatacacaccattggtgttttgcactttggtggcgaaatattcggaatcgtaggcgtcgttaatcaacttcatttcatcgcgcagccactgaatggatgcgcctgccataaacaccgcaccttccaacgcatagttcacttcgccagtcgggccgcaggcgatggtggtcagcaggccgttttcacttttcaccgctttctcgccagtgttcatcagcataaagcagccagtgccataggtgttcttcgccatcccttctttcacgcacaactgaccaaacagcgcggcctgctggtcaccggcgatcccggagattggaatacgcgtgccgcctttgccgccaatgttagtctgaccgtatacttcggaagaacgacgcacttctggcagcatctcgcgcggaatatccagcacttccagcattttgtcgtcccagtccagggtatggatgttgaacaacatggtacgagaggcgttggtgtaatcggtcacatggacacggccctgagtcattttccagataagccacgtatcaaccgtaccaaacagcaattcaccacgacgtgcacgctcgcgagagccttccacatggtcgaggatccacttcactttggtgccagaaaagtacgggtcaatcaccagaccggtattgctgcggatataatcttctaaaccgtcacgttttaaatgctcgcagatttctgcggtacgacggcactgccagacaatggcgttatagataggcttgccggtttctttttcccagacaatagtggtttcacgctggttcgtaataccgatagctgcaatttgatcggaactgatatcggctttcgccagcacttctaccagcgtggagctttgggtggcccagatttccattgggtcgtgttctacccaacctggttttgggtagatttgctcaaattcgcgctggctcacgctaatgatattggcatcgtgatccattacgaccgcgcgggagctggtggtgccctggtcgagcgcaacgatatattttttttcagtcatgtttaattgtcccgtagtcatattacaggctagctttttgttcactaggagttgtggtttccttttcttccacaacacagatatcgcaaggcaaatggcgaccaatcagtttgcggtaggcaaatgcacctacaatcgcgccaacgatagggccgaaaagcggcaccaggaagtaaggaatgtctctgccgccggtaaaggcgacattgccccagcccgccagccaggcaaagactttcggaccgaagtcacgcgctgggttcatggcaaaacctgtcaatgggcccatagatgcgccaatgaccgcaatcagtagaccaatcagcaagggagccaaagggccgcgtggtacaccgttgccatcgtccgttaacgccaggatcagccccatcagaatagcggtaatcaccatctcaactgcgaaagcctgcacaaaattgatatgaggattagggtaagtagagaaagtgccagccagatcaacactttcaacgctgccgcgaacaatgtgatgagtctgctcgaagtcgaaaaataaattgtagtaaagcccgtaaactaaagccgcagcacagaaagcgccggcaacttgactaacgataaaaggaataactttgcgcttgtcgaaacaggcaaacagccacaatgcaatggtaacagcgggattaagatgcgcgccggaaacccctgcggtcaggtagatggccattgccacccccagtccccaaatgacactgatttcccactgaccaaaagacgcaccagcgacttttagtgctgcaacgcaacccacaccgaagaaaatcaacaacccggtaccgaggaattcagcaatgcactggcctttcaaggtacttgtttgactcataatcggatcctgaagagttaatgtttgttgtatgcgtgaaagtcacggacctccacgatgcttgtaggcatgctgtaaacttatcgttaacgagcaaaaacgagaaatatcgaacttaaaatgtgtgtgcctcgtcataaaatgagcgttatcgcgccatttattccatctgattgtacatgatgcatgtttgttagatcattcgcgcaacaaatttattaacattttcgattgatgtggattatgtcaccaggagaaggatgaaaagtgtggcaaaccgtaatctgcaaggcgtgccgctggacagcgatggcgcggcttcatacaatcggagctaactaaagtgcgctcgtatttattaaggcgtcaccggtaatcgggacgaggatttttatccatcaacgccttgcaattcaggagaggtatgacaatgagtttagaagtgtttgagaaactggaagcaaaagtacagcaggcgattgataccatcactctgttgcagatggaaatcgaagagctgaaagaaaaaaacaacagtctgagccaggaagttcaaaatgcccagcatcagcgcgaagagctggagcgtgagaacaaccatctgaaagaacagcagaacggctggcaggaacgtctgcaggccctgctgggtcgcatggaagaggtctgattacgcttcatcttccgcgtaatttctttactgtgtaggccaacaggtaacgcagaaaaaaggcaccttgcggtgcctttcttatcattcaatatccagcggatcttcactaagaataatcccggtattgtcggcataaagatggtcgccggagaagaaggtgacaccgccaaaattgacgcggacatcgctttcgccaatgccttcgccagcggcaccaaccggaattgccgccatcgcctggatgccgatatccaactcttccaggtcatctacctgacgcaccgcgccgtaaatgaccagaccttcccattcattttgtactgccagacgcgccagttcagcatcgaccagtgcgcgacgaacagaaccaccgccatcgacgacaagaacacgaccacggccattctgttcgagcagatcgtacagcaacccgttgtcctcgaaacattttaccgtgattatttgtccgccaaagctcgcccgtccgccaaagttggagaacagcggttccacgacgttaacatcttcttgatagatgtcacaaagctcggaagtatcgtatttcataggcttaacattcagttgctgcgagaattttcagtatatcgcgctatgtgggctgttggcaaaatcatcaattgttaattgatatttgtcagttatgctgcccactggcttaggaatatccctaaaacaaacagcaggttagtcagtaacgctcccttgacagtacgttccagcattggtcgcatcgccaccgggtccatttcccgcatcacataacgggcttgcttcaccagtaatggtgccgccagcaggaacagccagccccacaggctatgcaggctaaagagattaaacagcgccagacacaccaggctgcccatcagcaggcaggcatgataacgacgcgcgttcacttcacctaagcgcaccaccagcgtgtttttgccattttcgcggtcgctattgatatcacgcaggttattaatattcagtactgccgttgccagcaggccgcatgcggtcgccggaaggatcagtgccggaatcaatgtatgagcctgtaaataccagctccccatgacactcaaccagccaaagaaaaccagtacggaaatatcacccagaccgatataaccataaggacgattgcccacggtgtaggtgatagcggcaatgatgctcaacccgccaagaatcaggaaaccgacaaaatcggccagcgtatggcatgccactgcaaccagtgccagcccggagagacagatgagcacgacggtaataatgagcgcccgtttcatctcttgctgggtaatgacccctttttgcatgccgcgtagcggcccaatgcggtcaggtttatcgctgccttttaccgcatcgccgtaatcattggcgaggttagaaaggatctgtaatagcccggcggtaattagtgccagcagggcgaccagcggatcgaagtgaccttgccaccatgccagcgctgtcccgacgataattgcagcaaaggcgagggggagggttttaggtcgtaaactttccagccacgcctgagttcggctaatttgttgttcagtcataatacgcgccaataaaaatggggcctttcagccccatcaaacaatgatgaaaatgattgaacgcgattataggataaaacggctcagatcttcatctgccaccaacgcatccagatgtttgctcacataatctgcgtcaatagtgatattttgaccgcttaaatcgctggcgtcgtaggaaatctcttccattaaacgctccagaacagtgtgtaaacgacgagcaccgatgttttcggtagattcgttcacctgccatgccgcttccgcgatgcgtttaataccggagtcggtaaactcgatatttacgccttcagtcgccatcagtgctttgtactgcacggtgatagaggcattcggctcggtcagaatacgctcgaagtcgctggtggtcagcgcctgcagttcaacgcggattggcagacgaccttgcagttccgggatcaggtcagacggtttcgcaatctggaacgcgccagaagcgataaacagaatgtggtcagttttgaccatcccgtgtttggtggaaacggtgcaaccttctaccagcggcagcaggtcacgctgaacgccttcacgagaaacatccggaccggaagactcgccgcgcttacagattttgtcgatttcgtcgataaacacgatcccgtgctgctcaacagcgtcgatagcgtcttgcttcagctcttccgggttcaccagtttcgccgcttcttcttcaatcagcagcttcatggcgtctttgattttcagcttacgcgctttttgcttctggccgcccaggttctggaacatggactgcagctggctggtcatctcttccatgcccggaggagccataatttcaacgcccatcggtgctgcggcaagatcgatctcgatttctttgtcatcaagctggccttcacgcagttttttgcggaatgcctgacgagcagcggacggttcctgctgctgttcggtctgtccccagttgtttttagcaggtgggatcagcacgtcgagaatacgttcttctgccagttcttcagcgcgataacggtttttctcgatagcctggacgcgtaccattttcacggcggcatcggtcagatcgcgaataatagaatccacttccttaccgacgtagcccacttcggtgaatttggtcgcttcaactttgatgaacggcgcattcgccagcttagccagacgacgggcgatttcagttttaccgacaccggtcgggccgatcatcaggatatttttcggggtcacttcatggcgcagctcttcgttgagctgcatgcgacgccagcggttacgcagagcaatcgccacagaacgcttggcgttgtcctggccgatgatgtgcttatccagttcgctgacgatttcgcgtggggtcatttcagacatgggagatccttacgctttgtagcttaattcttcgatggtgtggaaatggttggtatagatgcaaatgtcgcctgcaatatccaacgccttttcagcaatttcacgggcgctaagttcagtgttttctaacagcgcgcgcgccgcagcctgggcgtaagggccgccggagccgatagcaataagatcgttttctggctgcaccacgtcaccgttaccggtgatgataaggcttgcagtttcatccgcgactgccagcagtgcttcaagtttgcgcagcatgcgatcggtacgccagtcttttgccagctcaacggcggctttgaccagatggccctgatgcatttccagtttacgttcaaacagttcgaacagcgtaaaagcatccgcagtaccgcccgcaaagcccgcgatgactttgtcgttgtacagacggcggacctttttcacgttgcctttcattacggtattgcccaacgtggcctgaccatcaccagcgatgaccacatggccgttacggcgtacgcttactatagttgtcacgagctgaccccttggttacgaatacagagtacaaaccccgtacaaaagtacggggcataatgcaattatagatgggggggattttgagggtttcaacccccggcggcgagccgaatgcagtttgtatgacccgccatcttcaaccgattgagggtgctgtctgcgttctctttgcctttcaccgggccaatgaccacacgattccagccattgttggtggtgattttgctgtcaaagccttcgaacgccagctgagcacgtaccgtctctgcctgttccgcgcctctgaagctaccgcactgcaccatccagcggcgttcgtcttttttctccgccgtcggttttggcgcgtcagcggcacgagcaactggcgcagcttgctgcggcttgctctgcgcagtcgtgtgcgcaggagtttgcagcagatcctggtacggctgctgagaagaagccggtttagactggcgcggttgcgcctgtaccggtgcggcttggctcgtacgcgtctgctgctgccagctttgttcagtcgtacggctctgctgagccaggcgttgctgttccgctaattgctgcgcctgacgttggcgctgtagcgtttgctgacgctgttccggcgtctgttcattccacggaacttcaaccagctgcgttggctgctggcgcatatcagcctgcatttgttcaagaagctgacgttgttctggtgtcagttgctccggcgttttcacttcaccaccggcagaaggttctgtgggcgcacgcactcccggctggcgactttccagctctttaatgtagcgccagcgttcttctggttttggtggtagtccgtttccggtcactttctggctttgcagcgtctcggactcttctttcttgtgatgcgtaatgaagtacagaccaccgataaaggtcacaagaacggcggcagcaatagcgaccatagcgggagaaaccgcaggcagatttcgttgctttttccgactggtgctcttttttcgccggctaggtgccggttggctgcggcgtacataatctcgttgtgccactatcgtttcgctgtatttattcgttcgtcagcccgccatgttacttaagcggcgggcctttgaccagtcacggcagtcttaaaggtttactttaaggtaacgcgcgtgtacttccccggatgataagttcgcagtccattaaacgagagccactgccaacgtgttgcccctgcatttgatcaagcaataacagcatagcttcccgaccgatttcgtaacgcggctgcgcgatggttgtcagcggcggatcacaaaattgcgtcaggtcgatgttatcaaaaccgattatggaaaggtcttccgggactttcagcccctggcgttttgcctgagaaagtgcgccgagcgccatcacatcgctatggcagaagacagcagtaggcggttgtggaagatcaagcagctgctgcatcgctttgcttccggcttcgaaggtgaagtcgccacgggcgatgtattgcggatcaaccataatgccgcagcgacgcagcgcctgaacatagccttgcaggcggtagtgacacagcggcatctcttcgggaccggctatacagccaatccgtttatgcccttgctcatataaataatttactgcatcaaatgcggcggtcagattgtcgatatgaactgtaggcagctccagctccggtgcaaattcgttcgccatcaccatcggcggcagattacgctgttcctcaatgctggcatcaaacggcagcctactacccagcaacaacatgccatcaatttgcttggtgatgatcaaatcgataaaggttttttcctgctgattttgatgcgcacagtcgccaatcagcaccagatatccgtgatttgccgccgtaacttcgataccgcgaataatttcgctaaagaagggatcgcagatatccgggacaatcaccagaatggtgcgggattcattacgcttgacgttgcgccccataggctgcggtaaataacccacttcccgggccgctttttcaacccgattacgggtggcctgggagactttatcgggattcattaatgctcgggagacggtcgctgtagagacttttgccttgagggcaacgtctttcatggtcgcggcagtttcctgcttcttcgctttcacactcactcctcgcctggcacgtcaggcgtactacatccatgtttacttcacatcggcaacatttttagcagatagcgcgtgaaaacggttacagaattttcatgaaaagtgtgatgaatattgaatttttcgatccgcctcgcatcgtgagcggtttaaccctcaatcggatcaacatccagcacccatttcaccttacgggaatccggtattgtattgatgagcgccagcgtaccgttaatgatgtgttgcaagcgcacgcgggaagggtgctgcaacaatatctgccagcgccagcgaccgccacgtttaggtgccagagccggaaccggaccgagaacccacagtttctcgtctgccagtgggctggagaggatcagattacgcagttgttgcaggaacaatggcgcgtgctgattgttatgatcttccgcacgcacaatcacatggctggtccacggcggtagctgcatcattcgccgctcagccagcgcctgttcggcaaaggcgtcgtagcctttatagagcaacgtttgcaacagaggatgttccggatggtgcgtttgcagcaccacttcgccctgtttacccgcacgcccggcacgaccggcgacctgggtgtaaagctgagcgaaacgctctgcgctgcgaaaatcggcagaaaacagcgcgccgtccacgtccagtaatgcaaccagcgtcacatccgggaaatggtgacctttcgccagcatttgtgtaccaatcaaaatccgcgcgccgccgcgatgtacttctgccagttgctgttccagcgcccctttgcggctggtggtatcgcggtcgatacgagaaatgggcacgccggggaacaacggcgcgagcgtctgttcaagctgttcggtgcccagccccacggggaccaggtgcgtggaaccgcaggaagggcactggcgcggcaccggacgctgactgtcacagtggtggcagcgcagatggtgctgcgcctgatgcagcgtgtagtagtgatcgcaacgtgggcattcggcaatccagccacagtcgtggcacagcagtgcaggcgcaaagccacggcggttaagaaagagaatgacctggttatcagcctgtaaatgctggcgcatacgagtgattaacgccggagccagacctgcctgcaccttctgaccttttaaatccagcacatgttgaattgccggacgcgcattccctgcccgacgggtcaggcgcagcaggcggtattttttctgctggacgttgcataacgtttccagcgcgggcgttgcggagccaagaataatcgggatttgctcgctgtgcgcacgatacaccgccaggtcgcgggcatgatagcgccagccttcctgctgcttgtaggagctgtcgtgctcttcatcaatgacaatcacgccgagatttttaaacggcgtaaacagcgcggagcgggtgccgatcacaatcgccgcctcaccatttttcgctttcagccacgcgctaagacgctcgctgtcgttcaggccggaatgcagaacttccacgggggcattaaaacgttcacgaaaacgggcgatagtttgcggtgtcaggccgatttccggcaccatcaccagcgcctgtttgccctgagcgagcacgttttccagtacgctgagataaacctccgttttaccggaaccggtaacgcccgccagcagccaggcagaaaaagtatctgccgcgctatgaattgcgccaacggcggtggcctgttcggtattcaatcgcaaccgctcaccagaaacggcatagttcgttcgccagtcgctaaactctggtgtttcacttgctaaatcacacagaccttttttgcgtagcgcctgcaacgcggcatcattaaattcgagcgtggcgacctggtcgcgccagattttgccttgccgtaacgccgccagcgcctgttgttgcttgggggagcgtttcaggctgttcagatccaccgcctggccttgttcagtggcaaaccagtaccacatcggcgcgttcgccgcaggccgcccctggcgtagtaaaatcggcaaggcatgaaacagcacatcgccaatcggatgatgatagtaatctgccgcccatagcagcaatcgccagacggagtgagtaaacaccggctcactatccagcacttcgactaccgcttttagctcattgagcggcagttcgctggcatcgctaacacttaccacaatcccgatgcgctcctgctgtttgccaaacggcacgcgcacgcgacacccagctttaaccgtcatgccttctggcagcagatagtcaaaggtacgaggaagcggaacgggcaaggcaacgtgggcaacgggcatagcatcatcctgacttgaaattcggtgggttagtatacacattgccgtagaagagtgcggatcagtttgcatacgctggttaatttctgtatgatttcgcgccttcgtacgaaatgatcgtattgaagctatacttttaacatcgcgtggtgtctggcgttagggctggaagagcgacgcggccttaaaccgaggttttcccatgaaaaaagatattcacccgaaatacgaagaaattactgctagctgctcttgcggtaacgtaatgaaaatccgctccaccgttggtcatgacctgaacctcgacgtgtgcagcaagtgccacccgttcttcactggcaaacagcgtgatgttgctaccggtggccgtgttgaccgcttcaacaagcgtttcaacatcccgggcagcaaataagaccggatttccgaaaaaagcgccgcacggcgctttttttgtgcctgaattttggtcgtattaccagctaaacagcggccattctttggcgaccgtggtgagttgtggcgcatcgaaaacggcttgtgggctgaccaccgtttcctcaagcggaatattcttgccgtaacgttctttgagctttgcctgaacttgtgggctgctcaggtcgaactctttcaacttctgctgctcgcccacgcgcattcccagcgcgttctggtaaaccttccacaccacttcgctacagtactggcgatcgtcgctccaactgaagctgaaatcatacggtttaccgagataacgttttgccgtttgcgccagtttttgctgttgttcaacactcagtccgccttcaacgcggcgaacaacgtatttgcccttttcaccatgggcgatccactgcttgagcggggtgtatttcaccgggccgactgcttcaaaaacgtagggctttttgttgcgtatcaccagcataccggtgtggctataatcggtatgggtcgccagttggatcgctttactttggctactgcgagagatctgaaagatgatgtcgccggtttgtggctgccaggcaaaggcaggtacagaaaccagcaggctgaggatcagcagcctgtttttcatagttaaacgtccatgtataaaaagcggtgggtcgcagacaacgtgctcgttgtttatgccggatgcggcgtgaacgccttatccggcctacaagttcgtgcaaattcaataaattgcaatatgacgtaggcctgataagcgtagcgcatcaggcgattccactccgcgccgctcttttttgctttagtattcccacgtctccgggttaatccccatctcacgcatgatctcttttgccgcttccgggatttcgtcgctgcgctctttacgcagatcggcatcatccggcaaaggttgcccggtaaaggcatgcagaaacgcttcgcacagcagctcgctgttggtagcgtgacgcaggttgttcacctgacgacgcgtgcgttcatcggtgaggatttttaacaccttaagaggaatggaaaccgtaatctttttgacttgttcactcttcttgccgtgctcagcgtatgggctgatatattcgccgctccattcagccatgagatacttaatcctcttcgtcaataaattgagaccagaccacacagttgatgtgggtactgaccgtaaacccgcatagtttaccgtacaggcgttaccgtgacatcgtgtaatgcacctgtcggcgtgataatgcatataattttaacggctatttgggatttgctcaatctatacgcaaagaagtttagatgtccagatgtattgacgtccattaacacaatgtttactctggtgcctgacatttcaccgacaaagcccagggaacttcatcacatgacgcgtaaacaggccaccatcgcagtgcgtagcgggttaaatgacgacgaacagtatggttgcgttgtcccaccgatccatctttccagcacctataactttaccggatttaatgaaccgcgcgcgcatgattacagccgtcgcggcaacccaacgcgcgatgtggttcagcgtgcgctggcagaactggaaggtggtgctggtgcagtacttactaataccggcatgtccgcgattcacctggtaacgaccgtctttttgaaacctggcgatctgctggttgcgccgcacgactgctacggcggtagctatcgcctgttcgacagtctggcgaaacgcggttgctatcgcgtgttgtttgttgatcaaggcgatgaacaggcattacgggcagcgctggcagaaaaacccaaactggtactggtagaaagcccaagtaatccattgttacgcgtcgtggatattgcgaaaatctgccatctggcaagggaagtcggggcggtgagcgtggtggataacaccttcttaagcccggcattacaaaatccgctggcattaggtgccgatctggtgttgcatagttgcacgaaatatctgaacggtcacagtgacgtagtggccggcgtggtgattgctaaagacccggacgttgtcactgaactggcctggtgggcaaacaatattggcgtgacgggcggcgcgtttgacagctatctgctgctacgtgggttgcgaacgctggtgccgcgtatggagctggcgcagcgcaacgcgcaggcgattgtgaaatacctgcaaacccagccgttggtgaaaaaactgtatcacccgagcttgccggaaaatcaggggcatgaaattgccgcgcgccagcaaaaaggctttggcgcaatgttgagttttgaactggatggcgatgagcagacgctgcgtcgtttcctgggcgggctgagcttgtttacgctggcggaaagtttagggggagtggaaagtttaatctctcacgccgcaaccatgacacatgcaggcatggcaccagaagcgcgtgctgccgccgggatctccgagacgctgctgcgtatctccaccggtattgaagatggcgaagatttaattgccgacctggaaaatggcttccgggctgcaaacaaggggtaaaaatgagtgtgattgcgcaggcaggggcgaaaggtcgtcagctgcataaatttggtggcagtagtctggctgatgtgaagtgttatttgcgtgtcgcgggcattatggcggagtactctcagcctgacgatatgatggtggtttccgccgccggtagcaccactaaccagttgattaactggttgaaactaagccagaccgatcgtctctctgcgcatcaggttcaacaaacgctgcgtcgctatcagtgcgatctgattagcggtctgctacccgctgaagaagccgatagcctcattagcgcttttgtcagcgaccttgagcgcctggcggcgctgctcgacagcggtattaacgacgcagtgtatgcggaagtggtgggccacggggaagtatggagcgcacgtctgatgtctgcggtacttaatcaacaagggctgccagcggcctggcttgatgcccgcgagtttttacgcgctgaacgcgccgcacaaccgcaggttgatgaagggctttcttacccgttgctgcaacagctgctggtgcaacatccgggcaaacgtctggtggtgaccggatttatcagccgcaacaacgccggtgaaacggtgctgctggggcgtaacggttccgactattccgcgacacaaatcggtgcgctggcgggtgtttctcgcgtaaccatctggagcgacgtcgccggggtatacagtgccgacccgcgtaaagtgaaagatgcctgcctgctgccgttgctgcgtctggatgaggccagcgaactggcgcgcctggcggctcccgttcttcacgcccgtactttacagccggtttctggcagcgaaatcgacctgcaactgcgctgtagctacacgccggatcaaggttccacgcgcattgaacgcgtgctggcctccggtactggtgcgcgtattgtcaccagccacgatgatgtctgtttgattgagtttcaggtgcccgccagtcaggatttcaaactggcgcataaagagatcgaccaaatcctgaaacgcgcgcaggtacgcccgctggcggttggcgtacataacgatcgccagttgctgcaattttgctacaccagtgaagtggccgacagtgcgctgaaaatcctcgacgaagcgggattacctggcgaactgcgcctgcgtcaggggctggcgctggtggcgatggtcggtgcaggcgtcacccgtaacccgctgcattgccaccgcttctggcagcaactgaaaggccagccggtcgaatttacctggcagtccgatgacggcatcagcctggtggcagtactgcgcaccggcccgaccgaaagcctgattcaggggctgcatcagtccgtcttccgcgcagaaaaacgcatcggcctggtattgttcggtaagggcaatatcggttcccgttggctggaactgttcgcccgtgagcagagcacgcttagcgcacgtaccggctttgagtttgtgctggcaggtgtggtggacagccgccgcagcctgttgagctatgacgggctggacgccagccgcgcgttagccttcttcaacgatgaagcggttgagcaggatgaagagagcttgttcctgtggatgcgcgcccatccgtatgatgatttagtggtgctggacgttaccgccagccagcagcttgctgatcagtatcttgatttcgccagccacggtttccacgttatcagcgccaacaaactggcgggagccagcgacagcaataaatatcgccagatccacgacgccttcgaaaaaaccgggcgtcactggctgtacaatgccaccgtcggtgcgggcttgccgatcaaccacaccgtgcgcgatctgatcgacagcggcgatactattttgagcatcagcgggatcttctccggcacgctctcctggctgttcctgcaattcgacggtagcgtgccgtttaccgagctggtggatcaggcgtggcagcagggcttaaccgaacctgacccgcgtgacgatctctctggcaaagacgtgatgcgcaagctggtgattctggcgcgtgaagcaggttacaacatcgaaccggatcaggtacgtgtggaaagcctggtgcctgctcattgcgaaggcggcagcatcgaccatttctttgaaaatggcgatgaactgaacgagcagatggtgcaacggctggaagcggcccgcgaaatggggctggtgctgcgctacgtggcgcgtttcgatgccaacggtaaagcgcgtgtaggcgtggaagcggtgcgtgaagatcatccgttggcaagtctgctgccgtgcgataacgtctttgccatcgaaagccgctggtatcgcgataaccctctggtgatccgcggacctggcgctgggcgcgacgtcaccgccggggcgattcagagcgatatcaaccggctggcacagttgttgtaatttcagaaatttaataatgcccggtactcatgttttcgggtttatggtttctaatgaaatatattgaattatcataggattaggccggattaagcgtttacgacgaatccggcaagaagcaataagtacatggttagtttatatttgcagtccggtttgctttgcataccggattttctttttcttaccatcctgaagttttttcatcttccctgatttttcctcaccatcattggtcatttttcggttgacgcccttcggcttttccttcatctttacatctggacgtctaaacggatagatgtgcacaacacaacatataactacaagcgattgatgaggtaaggtatgagcttttttcacgccagccagcgggatgccctgaatcagagcctggcagaagtccaggggcagattaacgttagcttcgagtttttcccgccgcgtaccagtgaaatggagcagaccctgtggaactccatcgatcgccttagcagcctgaaaccgaagtttgtaagcgtgacctatggcgcgaactccggcgagcgcgaccgtacgcacagcattattaaaggcattaaagatcgcactggtctggaagcggcaccgcatcttacttgcattgatgcgacgcccgacgagctgcgcaccattgcacgcgactactggaataacggtattcgtcatatcgtggcgctgcgtggcgatctgccgccgggaagtggtaagccagaaatgtatgcttctgacctggtgacgctgttaaaagaagtggcagatttcgatatctccgtggcggcgtatccggaagttcacccggaagcaaaaagcgctcaggcggatttgcttaatctgaaacgcaaagtggatgccggagccaaccgcgcgattactcagttcttcttcgatgtcgaaagctacctgcgttttcgtgaccgctgtgtaagcgcgggcattgatgtggaaattattccgggaattttgccggtatctaactttaaacaggcgaagaaatttgccgatatgaccaacgtgcgtattccggcgtggatggcgcaaatgttcgacggtctggatgatgatgccgaaacccgcaaactggttggcgcgaatattgccatggatatggtgaagattttaagccgtgaaggagtgaaagatttccacttctatacgcttaaccgtgctgaaatgagttacgcgatttgccatacgctgggggttcgacctggtttataaatagtgtggcttttgtgaaaatcacacagtgatcacaaattttaaacagagcacaaaatgctgcctcgaaatgagggcgggaaaataaggttatcagccttgttttctccctcattacttgaaggatatgaagctaaaacccttttttataaagcatttgtccgaattcggacataatcaaaaaagcttaattaagatcaatttgatctacatctctttaaccaacaatatgtaagatctcaactatcgcatccgtggattaattcaattataacttctctctaacgctgtgtatcgtaacggtaacactgtagaggggagcacattgatgagcacgagtgacgatatccataacaccacagccactggcaaatgcccgttccatcagggcggtcacgaccagagtgcgggggcgggcacaaccactcgcgactggtggccaaatcaacttcgtgttgacctgttaaaccaacattctaatcgttctaacccactgggtgaggactttgactaccgcaaagaattcagcaaattagattactacggcctgaaaaaagatctgaaagccctgttgacagaatctcaaccgtggtggccagccgactggggcagttacgccggtctgtttattcgtatggcctggcacggcgcggggacttaccgtagtatcgatggacgcggtggcgcgggtcgtggtcagcaacgttttgcaccgctgaactcctggccggataacgtaagcctcgataaagcgcgtcgcctgttgtggccaatcaaacagaaatatggtcagaaaatctcctgggccgacctgtttatcctcgcgggtaacgtggcgctagaaaactccggcttccgtaccttcggttttggtgccggtcgtgaagacgtctgggaaccggatctggatgttaactggggtgatgaaaaagcctggctgactcaccgtcatccggaagcgctggcgaaagcaccgctgggtgcaaccgagatgggtctgatttacgttaacccggaaggcccggatcacagcggcgaaccgctttctgcggcagcagctatccgcgcgaccttcggcaacatgggcatgaacgacgaagaaaccgtggcgctgattgcgggtggtcatacgctgggtaaaacccacggtgccggtccgacaagtaatgtaggtcctgatccagaagctgcaccgattgaagaacaaggtttaggttgggcgagcacttacggcagcggcgttggcgcagatgccattacctctggtctggaagtagtctggacccagacgccgacccagtggagcaactatttcttcgagaacctgttcaagtatgagtgggtacagacccgcagcccggctggcgcaatccagttcgaagcggtagacgcaccggaaattatcccggatccgtttgatccgagcaagaaacgtaaaccgacaatgctggtgaccgacctgacgctgcgttttgatcctgagttcgagaagatctctcgtcgtttcctcaacgatccgcaggcgttcaacgaagcctttgcccgtgcctggttcaaactgacgcacagggatatggggccgaaatctcgctacatcgggccggaagtgccgaaagaagatctgatctggcaagatccgctgccgcagccgatctacaacccgaccgagcaggacattatcgatctgaaattcgcgattgcggattctggtctgtctgttagtgagctggtaagcgtggcctgggcatctgcttctaccttccgtggtggcgacaaacgcggtggtgccaacggtgcgcgtctggcattaatgccgcagcgcgactgggatgtgaacgccgcagccgttcgtgctctgcctgttctggagaaaatccagaaagagtctggtaaagccagcctggcggatatcatagtgctggctggtgtggttggtgttgagaaagccgcaagcgccgcaggtttgagcattcatgtaccgtttgcgccgggtcgcgttgatgcgcgtcaggatcagactgacattgagatgtttgagctgctggagccaattgctgacggtttccgtaactatcgcgctcgtctggacgtttccaccaccgagagtctgctgatcgacaaagcacagcaactgacgctgaccgcgccggaaatgactgcgctggtgggcggcatgcgtgtactgggtgccaacttcgatggcagcaaaaacggcgtcttcactgaccgcgttggcgtattgagcaatgacttcttcgtgaacttgctggatatgcgttacgagtggaaagcgaccgacgaaagcaaagagctgttcgaaggccgtgaccgtgaaaccggcgaagtgaaatttacggccagccgtgcggatctggtgtttggttctaactccgtcctgcgtgcggtggcggaagtttacgccagtagcgatgcccacgagaagtttgttaaagacttcgtggcggcatgggtgaaagtgatgaacctcgaccgtttcgacctgctgtaatctgaccccgttcagcggctgcttgctggcagtcgctgaacgttctttaccagcgtatagtgggcgaacgaaaactacacactggatctctcatgtctgccgcaggaaagagcaacccactggcaatcagtggcctggttgtgctcacacttatctggagttatagctggattttcatgaagcaagtcaccagttacatcggtgccttcgactttaccgccttacgctgcattttcggcgctctcgttttattcatcgtccttttattacgtggtcgcggaatgcgcccgacaccgtttaaatacaccttagccattgccctgttacaaacctgcgggatggttggtctggcgcagtgggcgttggtcagcggaggtgcggggaaggtggcgatcctgagctataccatgccgttctgggtggtgattttcgccgcgttgtttctcggtgaacgcctgcgacgtgggcaatatttcgcgattctgattgccgctttcggcttatttttggtgttgcagccgtggcaactcgatttctctagcatgaaaagtgccatgctggcaatcctctccggcgtcagttggggggcgagcgcgattgttgctaaacgtctgtatgcccgtcatccgcgcgtggatttattgagcttaacatcctggcagatgctgtatgcggcgctggtgatgagtgtggtcgctttactggtgccgcaacgtgaaattgactggcagcccaccgtgttctgggcgctggcctacagtgcgattctggcgacggcactggcgtggagcttatggttgtttgtattgaaaaacttgcctgccagtattgccagcttaagcacactggccgttcccgtttgcggcgtactcttttcctggtggctgctcggcgagaatccgggggccgttgaaggtagcggtattgtgctgattgtgctggcactggcgctggtgagccgtaagaaaaaagaagccgtcagtgtaaaaaggatctgaattttttcttcatgtggggcgatctcttatttaacaaaataacgataatgccccaccatccgccagttaaacagcacatcttcttcctgcgcgcctgcgccaatgttatgtatcaccagcggcgtaccgtcgcgggcgaagccatcactaaccaccccaatatgtgccagcccgttatccagtcgccaggagacaatatcgcccgcttgatagtcactggggttcttgctggtggggcgtgttttatcatggcggctaaaccaggtttccagattaggcacccgacggtgatcgatgttgctgtccgggcgctttaacttccatttttgcgggtactcagcaaaattcttcgccatatcttcgtgaaccagtttctgcaaatcgaccttctggctgcgcaatgcgcggatcaccacatcggaacatacaccgcgttcttgcggaacatcaccgccaggataagtaagctgcacatacgccggatcgtaaaatagcgtgctgccaatttgctgtctggcaccgtctgcgatggcaaggttggtattggcctggatttgtaccacggttggtggaacggcgggagattttaaggagtggctggtaaatgccgttagcaggctgagcagcgccagactagctttcatctggttcgtccgtgaaaataagagtcacagattcgaccttccgggctaacgattgttctgtagagaaaatgtccagaagcggataaaaaattcctgaacaacgtgggagtttcagattactggcacagagtgccggatgcggagtgaacgccttatccggcctacaaaagcacgcaaattcaatatattgcagagattgcgtaggcctgataagcgtagcgcatcaggcaattttgcgttcaaactcccggacaagccgggagtttggagtaggttattcccactcttgcaggaaacgctgaccgtactggtcggctaccagcagagcggcgtaaacctgatctggcgtcgcgccgccaggcatgttgtgaatggtttcaccttctgcacatgccgcttctgccacaattcgcattttcgccgggacatcttctttaatatccagttgagcgagagttattggcaaacctaccgcatggctaagggcagctacggtttcgatttcctccaccggcgcattttccagaaccagctgcgtcagcgtaccgaatgccactttttcaccgtgataatagtgatgcgcgtccgggatagcggtcaggccgttatgcactgcgtgcgccgcagccagaccaccactttcaaaaccaacaccgctcaaataggtgttcgcttcaatcacgcgctccagcgccggagtcactacatgctgttcggcagcaagcatcgctttttcgccttcttccagcagggtgttgtagcacagttcagccagtgccagcgcagcctgggtgcacttgccgcccgccatggtggtcgcgccgctacgagagcaggcacgcgcttcaaaccaggttgccagcgcatcgccgatacccgccgctaacagacgtgcaggtgcgccagcgacgattttggtgtcgacaatgaccatattcgggttatttggcaacagcagatagcggtcaaactcaccctcatcggtgtagataacagacaatgcgctgcacggtgcatcggtagaggcgatagtcggtgcgatcgctaccggaacacccatgaaatgtgccagtgctttggcagtatcgagggtttttccgccaccgataccgagaattgcgccacactgcgcagtctccgcgatgccacgcagacggtcgatctcattttggctacattcaccgccaaacggcgcaatttctactaccagtccagcatctttaaagcttttctcgacagtggattgagcaaaacctaaaacaaatttgtcacccaccactaaccagcgttctgccagcggcttcaggtattcgcccagacgattaatcacatcagcgccctggatgtatttacccggactttgaataatgcggtccataattgctcctttagagatgagtagtgccaaatgcggcattccagtcgtgttcgaacttctctatagcactctctaccgcaggggtgttgagcatttgttgcgctacatctaagggcagggtgatggattcacatcctgccagtaaacagtccagcgcctgacgcggcgttttaaagctggctgccagcaccatgctttctggcgcgtgcatttctaacagcgtttgcagctcctgaaccgtacgaatgccgtctccgccctgggcatctacgcggttaacatacggagcaacgtattttgcccctgccagtgcggctaataacccttgtgcggcgctatatacagcagtgccaagtgtagtaataccctcttttttcagtattttaattgctgccagaccttcggaagtcaccgggattttcaccacaatacccggaatagcgtcgcgcaggcgcttcgcttcttccaccatcccctgcgcgtcgcggctcatggtctgagcaaacagaatgccctcatcaccaatcgctttttgcagacgcggcagcacttcccatatggactccttgctggcagcgataatgctcgggttagttgtcaccccggcaatggggaatatgcgtgccagacgttcgacttctgcgacgttagcggtgtccagatacagttccatgatgtttccttttacagttccagttcatgttgcagcaggctggcgatagcgtcggcagaggcggcgttaaccagcgcgttacggaattcttcgtgcatgatgcggcgagcgaggcggctgaaaatgcgcatatgctgatcgcccgcagcgtgtttgttcagggttaacataatgatgaattgcgcttcatcatcgccccagcgcaccggcgcttgcagacgcgccacgctgatggtggattgctcaatgtgttcacttttgctgtgtggaatggcaaaactaaagcccagaccggtagagaaaacggcctcgcgcgcccacaagtcggcttccagtttacgcggatagcggcagcggcccgccagcagcaggttatcggtcatgcctttgagcacttcttctttgctgcgccagtcgctttccagtgtgatgcactcggcggtgaccagcggtgcgtcttgttgggtcatgcggaattgcgccagcaggtgttctacttccaggctagtacggcaggccattgcctggttgagcaacttgcggcactcacggctatcaagttgcgccatccgagctttcgccgccggaatacttggtgcgctcatgctgagttcatccagccctaagccgaccagcaacggcagcacggaacctttcgctcccagctcaccgcacagaccaatccatttgccctggcgatgcaccgcttgcacggcgtaatcgagcgcccgcaagaatgccggattcaggctgttgtagtgacgagtaaccttagcgttatcgcgatccaccgccagcagatactgcgtcaggtcattactaccaatactaaagaaatcaatctcttcgcagcattgatcgatgatgaacatcacgctcggcacttccagcatgatgccgagctggattttctcatcaaacggaatgtgttcgttacgtagttgctgtttggcttccgccagtttttctttcacccataagatctcttccatactggagatcatcgggatcatgattttcaggctgccgtgagcggaggcgcggaggatgctccgtagctgcgtggtaaacaagctcgcgtactcttcataaatacgcacggcgcgataaccgaggaacgggtttgcctctgcgggaatgttcagataatcaacgggtttgtcgccgccaatgtccatagtgcgcacaataatgctgcgtccgttggcggattccagcgcctgacaaaaaatgttgtacaactcgctttcgcccggtgcgctggtgcgatccatatagagcatttcagtgcggaacaaaccaacgccttccgcaccattgccgaatgcggcctgcgcttccacggagtgagcgatgttagcggcaatttcaatgcggataccgtcagcggtacgggcttgttgggtcagccagacacgctgttgctcacgcagggcgtcctgtacgcgggcttcttgctgataataacgagctacggcttcccctggctcaaccacaatcgccccggcgttgccgtcgatataaatcgtttgttgctgccacggagtaagggcatcaatatccacaccaaccagcgttggaatgttgaagctacgggcaaggatcaccgtatgactggtggtgccgccgcttttgagcaacaatcctttgaggtgatttttatccagttcgaggaactggctgggggtcagttcatcagccatacaaatggcgggctgcgtcagtttgcccggtgccgggaagcgttgctcaccgtagatttgctggagtaactggaagcagacgtcgcgtacgtccagggcacgttcttgcaggtagctgctgctggaacgggaaaactcttcgcaaaagtgattcgcgctggcaacaattgcttcggcgcagcttaatccggcgctgacgcctgccagtaaatgttcgcgcagggaagtatcgccagccagggatcggtgagcttccagaatcgcgctggtagcaccgtcgctatccagcagacgaaactcaatgtttttcagtaccagcgtcaggccgttttccagtgcggattgctcggcgtcaacgcctttggctgcgggaagattacccagcgcattgagatctaaagaagagatcggcgtcagaatgccgcctgcactaccgctgcacacggtgcgggcgcggataatttgcggattcagattggtcagactaaccggcagtggttccagttcgtcagatttaacttccgccagcggcgcatcgcagtgggggaattcatcgcgcagccattggcttaaacgctggtgcgcttcctgttcgtcggccccggaaatcagtaactggcagttatcgcccgccagcgtatcggtgccaatcagcgcaagggcgcttttggcgttgcccttgcggtcagtgcgcaggttatgccactcaatttgactactaaaagtattacacagcgtttcaacgtggcttgccggacgcgcatgtacgccgttaggtagctcacaaataaattccacaatcagggccattgcctctctcccggtacggttttctgtttacaggataagagcgcacggcaacggcctgccatgtgacaaatctgccaaaagctggacaaatgtaatgtaaccgtcaatttgcgacgcgtctcacaagacgctgttttgcggcatgcttccggtttatcgcaagttatgaggcggatcgcatttttgtactgatattacaaaagtccagtaaatggcctttttatccactgtttgctccgcctgcgattgcctattgtttcctccatcaaaaatatggacatgggctttcgcaagcccgggagcagcttatgaatgagttggtgcagatcctgaaaaatacccgtcagcatttaatgacgggcgttagtcacatgattcccttcgtggtaagcggcggtattttgctggcggtttccgtcatgttgtatggcaaaggcgcagtgccggatgccgtagccgatccaaatctgaaaaaactgtttgatatcggcgttgcgggcttgacgctgatggtgcctttcctcgcagcgtacatcggttattccattgcagagcgttctgcgctggctccgtgcgctatcggtgcctgggttggtaacagctttggtgcgggcttctttggtgcactgatcgccgggattatcggcggcatcgtggtgcattacctgaagaaaattccggtgcataaagttctgcgcagcgtgatgcctatcttcattattcctatcgtcggcacactgattaccgcaggcatcatgatgtggggcttgggcgagcctgtaggggcgttgaccaacagcctgactcagtggcttcaggggatgcagcagggcagcattgttatgctggcggtgatcatgggtctgatgctggcgttcgatatgggcggtccggttaacaaagtggcctatgccttcatgctgatttgcgttgctcagggtgtttataccgtggtggccatcgctgccgtgggtatttgtatcccgccgctggggatggggctggcgacgctgattggtcgtaaaaatttctccgcagaagagcgcgaaaccggcaaagcggcactggtgatgggctgtgttggcgttactgaaggggcgattcctttcgccgctgccgatccgctgcgtgtcattccttccatcatggtcggtagtgtttgtggtgcagtaactgcggcgctggtcggtgcgcagtgctatgcaggctggggtggtctgattgtgctgccggtggttgaaggcaagctgggttatatcgcagcagtggctgtcggagcagtggtgacggctgtttgtgtgaacgtgctgaaaagtctggcgcgtaaaaatgggtctagcactgatgaaaaagaagacgacctggatttggattttgaaattaattaattgaggaacgagccatgacgaaaattattgcagtaaccgcatgtcctagtggtgttgcccatacctatatggcagcagaggcgctggaaagtgccgcgaaagcgaaaggctgggaagtgaaagtagaaacccaggggagtattggtctggaaaatgaactgactgcggaagatgtggcgagcgctgatatggtgattctgaccaaagatatcggcatcaagtttgaagagcgttttgctggcaagaccatcgtgcgcgtcaacatcagcgatgcagtaaaacgtgctgacgccattatgagcaaaattgaagctcacctggcgcaaaccgcttaagttcttctcccgctcgcaagggcgggttcgctttcccacaggagttcctcatgacgaatcgtatctctcgcctcaaaactgcactgtttgccaatacccgtgaaatcagcctggagcgggcgctgctttataccgccagccatcggcaaaccgaaggcgaaccggtgatattgcgccgggcgaaagcaacagcgtatatccttgaacatgttgaaattagcattcgtgatgaagaactgattgccggtaaccgcaccgtaaaaccgcgcgccgggattatgagcccggaaatggacccttactggctgctgaaagagctggatcaattcccgacgcgtccgcaggaccgctttgctatcagcgaagaagataaacgtatctaccgtgaagagttgttcccgtactgggaaaaacgtagcatgaaagatttcatcaacgggcagatgacagatgaagtaaaagccgcgaccaacacgcagattttcagcatcaaccagacggataaaggccaggggcacattattattgattacccacgcctgttgaatcacgggctgggtgagctggtggcacagatgcagcaacattgtcagcaacagccggagaatcacttttatcaggccgcgttgttactgctggaagccagccagaaacacattttgcgttacgccgaactggcggaaacgatggcggcaaactgcacagatgcccagcgtcgcgaagagctgctgactattgcagagatctcccgccataacgcgcaacataagccgcagacgttctggcaggcgtgccagttattctggtacatgaacatcattctgcaatacgaatccaacgccagtagcctaagcttggggcgcttcgaccagtatatgttgccgttctatcagacaagtttaacccagggcgaagatgcggcgttcctgaaagaactgctcgaatctttatgggtgaaatgcaacgacatcgtgctgttgcgctccaccagtagcgcgcgttatttcgccggtttcccgaccggctataccgcactgctcggcgggttaaccgagaacggacgtagcgcggtgaacgtgcttagcttcctttgccttgacgcctatcaaagcgtgcaattaccgcaaccgaacctcggcgtgcgcactaacgccttgatcgacacgccgttcctgatgaaaaccgccgaaaccattcgcttcggtaccggtattccgcaaatctttaacgatgaagtggtggtgccagcgttcctcaaccgtggcgttagcctggaagatgcgcgcgactattccgtagtgggctgtgtggaattatctattcccggcagaacctacggcttgcatgacatcgcgatgtttaatctgctgaaagtgatggaaatctgcctgcatgaaaatgaaggcaatgctgcgctgacttatgaaggtttactggagcagatccgcgccaagatcagccactacatcaccctgatggttgagggcagcaatatttgtgatatcggccatcgcgactgggcacctgtaccgctgctcagtagctttatcagcgattgtctggaaaaaggccgcgatattaccgatggcggcgcgcgttataacttctccggcgtacaggggatcggtatcgccaacctgagcgattctctccatgcgttgaaagggatggtttttgagcaacagcgtttaagttttgacgaattgctgagcgtattaaaagccaacttcgcaacgccagaaggcgaaaaagtccgcgctcgcttaattaaccgcttcgagaaatacggtaacgatatcgacgaggtggataacatcagcgccgaactgttgcgccactactgcaaagaagtggaaaaataccagaacccgcgcggcggctacttcacgccgggaagctataccgtttctgctcacgtcccgttgggaagcgtggttggcgcgacgccagacggtcgttttgccggagaacagctggcagacggcggcttgagtcccatgctgggccaggacgcacaagggccaacagcggtactgaagagtgtcagtaagctcgataacacgctgctgtctaacggtacgttgctgaacgtgaaattcactccggcgaccctggaaggtgaagcaggattacgcaaactggccgacttcttacgggcgtttacccagcttaagttacaacatattcagtttaacgtggtgaacgccgacacgttgcgggaagcgcaacagcgcccacaagattatgccgggctggtggtgcgcgttgccggatacagcgccttctttgtcgaactgagcaaggagatccaggatgacatcatccgccggacagcgcatcagctgtaattaaactgtcgaaggagatccaggatgacaagttccgccggacagcgcatcagctgtaacgttgtggaaacgcgccgcgatgatgtggcgcgcattttcaacattcagcgttatagtctgaatgacggcgagggcattcgtacggtggtcttttttaaaggctgtccgcatctttgcccgtggtgtgctaatccggagagcatctccggcaaaatccagacggtacgcagagaggcgaaatgtctgcactgtgcgaaatgtttgcgtgatgcggatgaatgcccctccggggcgtttgaacggattggtcgcgatatcagccttgacgctctggaacgggaagtgatgaaagatgacattttctttcgcacgtccggcggcggcgtcacgctttctggcggcgaagtgttaatgcaggcggagtttgctacccgttttttacagcgactgcggctgtggggtgtgagttgcgccattgaaactgccggagacgcaccagccagcaagctattaccgctggcgaaattgtgcgatgaagtgttgttcgatttaaaaattatggacgcgactcaggcgcgggatgtggtgaagatgaacctgccacgcgtgctggagaatctgcgtttgctggtgagtgagggcgtcaacgtgatcccgcgtttaccgctgatccctggtttcacgctcagccgggagaatatgcagcaggcgctggatgtactgatcccgctgaatatcaggcagatccatctgttaccgtttcatcagtacggcgaaccgaaataccgcctgctggggaaaacatggagcatgaaagaggtgcctgcgccgagcagtgctgatgtggcaacgatgcgcgaaatggcagaacgggccggacttcaggttaccgtgggaggttaaaatggcatacctggtggcagtaaccgcctgcgtaagcggcgtggcgcatacttatatggcggcggaacggctggaaaagttgtgcctgttagagaagtggggagtcagcattgaaactcagggcgcgctgggaacggagaatcgtttagcggatgaggatatccgccgggcggatgttgctctgttgattacggatatcgagcttgccggtgccgagcgatttgaacattgccgctatgtgcaatgcagcatctacgcattcctgcgtgagccgcagcgggtaatgagcgcggtgcgcaaagtgctttctgcgccgcagcaaacccatcttattctggagtaattattctggagtagtcggtttttctgtcagttggctgtggtactgccggcgatattcgctcgggctgcgttcggtgtttttacgaaacagacggcagaagtagttgctgtcgacaaagccgcaggcgtgcgccacttcttttaccttcaggtcatagcctttcaataacgtcttagcgtgctccagtcgcgtgtgattcaggtattcgttaaaaccaatggcccccgttttttgaaacaggtggctgaggtaatttgggctaatataaaacgcctgtgcaacagattcgcgggtaagcgcggaggcatagcgttcgtcgatataatcgcgaatagcttcaaatagtgcctggctgcgactggcggtctggatttggctgccaagcaaatcgcggcagtggctaagcaggctggcgacgataagccttgccgtttgctgctcctgcggctgcatttgcatttcattgagcgtttgtagcagaaaagaacctatgcgtgggccgcgtcgggcgacgtgttgcttcgccagattttgatattgtttgccatcccattgcacgacgctgaagccgagttgctgtttgccaaacagcacgctaaaggtagtagcgggggcttgccattgtggaaaattccagccaccagcaggaacgtacagcacatcgccgggaactaacgttgctccagcgccggtatcaacaaactcaccttccagcacaatttccagccgtggaaaatcgacctgatacgcaagatcgggcaccgggccgttactgctggcaaagtaaatctggcgcagggacagcgggccgttgatcaggcgggagagcagatagctgacgtcgtgatacatgttattcccttaggtatgtagacgggaaaacagtaactggcattattaaaaaaggccacctgaaaagtgtggcctgaggggagttcgatgtaaacattgcggcagttgtattgccggatgtggcgtaaacgccttatccagcctaccgccgcgatctgtaggccggataagacgcgtcaagcgtcgcatccggcaaatagcgcctggctgataattactgattacccacctgatcgccatagggcagtgtgtcgtaatcgatcagtgcgtttttcttatacgggttaccaatccagcgggtagtttctttgaactgcggattcaccacactacgggttggatcgtaaccgtcgtaagataagcccgccaaatcactccaggtgtggatcagttccgccaggctgtatttacgatcaacatcctggctgaaatcacggggatgagtcgcttgccatttttcactcgtccacagcaggaacggaatggtgtacatatgacgcgtcgggttgtcctcattacgcccctgagttttgtgcggcggcgtgtcgtaaacctcttcaccgtggtcagagaaataaaccaggaaaccgttcgggtttgctgctttaaagtctttaatcaggctggcaaccacatgatcgttatacaggttagcgttgtcataatcgttataactctccagctcttccgcgtttaatcccggcggaacatgatcggtattgccatcaaacttgccctgattttccgggtagcggtatttgtatttgatatgcgtacccagcagatgaacaatgatcagtttcttcggcgcagggtcattcagcacttcctggaacggcttcagcacgttggtgtcgtattcacgcgcactctgcgtacgttgctggttcatgtagtactgcttgtcggtctggcggctaaataccgtcagcatggtattgcgggcggtcatcgtctgctggttggtgatccagaaggttttataacccgcctgtttcatcatgttcatcaggctcggctgcgtcagatacagatccgggttcttttcattggcaaaggtcagcgcctgttgcaggatttcaatggtgtacggacgagacgtaactacgttattaaacacggtcagattcggatcggttttatgcagcgcatccagctccggcgtggtttcacgcggataaccgtacagactcatgcgtccgcgctgggtgctctcgccaatcaccagcactaaagtgcgcggttcgttaccgctttcatctttgaaattagccagtggcggcaaggcattattttcattcagtaactttgttaggctgtttagttgctgacgatactgataatagccggtcaggaattgccacggtgcggcaggctccatacggctggccaggttatccaacgttttctcaaacggcttgtttttgataaacgtattcatggcgatcggatgcagaatcaagccataaagcagggcaaaagagacaacataacgccacggctttggaatatagaccgggcgcaggcgtgtccacagcagaactgccaccgccgtataggccagcgcgataagcacaattttcaggctgaaatactggcttaaatactcgctggcttcgttggtgttggtttcgaacatcacaaacagaacgctctggctgaactcctgaccgtagatgacgtagtagcacagcgccgccagagaggccgcccatagcaccacgccgattactgcggcaataattttaatccgcttcggaaagaggaataccgggatcaaccacaggctactgaataacaggctgtcgcgaatgccgttagtgccactataaccactgatgtaaataatggcctgtagcagagtagagaaaaaccaaaagtagagcagtgcccaacccagggctttccagctaaaaagaggtttagcctggacttctgtggaatgcatagtaagaacctgtcttgaaaaaatatcgccgaatgtaacgacaattccttaaggatatctgaaggtatattcagaatttgaataaaatgcagacagaaatatattgaaaacgagggtgttagaacagaagtatttcagaaaaccctcgcgcaaaagcacgagggtttgcagaagaggaagattagccggtattacgcatacctgccgcaatcccggcaatagtgaccattaacgcttgttcgacgcgaggatccggttcctggccttctttttctgcctggcgggagcggtgcagcaactcggcctgcaatacgttcagcgggtcggtgtaaatattccgtagctgaatagactctgcaatccacggcagatcggccatcagatgggaatcgttggcaatcgccagcaccactttgatgtcttcttcttgcaggttgcgtaactctttacctaacggccacagtgctttgtctaccaggcgttggtcatagtattccgccagccacaggtctgctttggcgaagaccatctccagcatgccgagacgcgtgctgaagaatggccaatcgcggcacatagcctccagctcgctctgtttgccgtcttcgaccactttttgcagcgccgtacctgcacccagccaggcggggagcatcagacggttttgcgtccaggcgaagatccacggaatggcgcgtagactctcgacgccgccggttgggcgacgtttcgccggacgactacccaacggcagtttgcccagttcttgttccggcgtagcggagcggaagtaaggcacaaaatctttgttttcacgtacgtagccgcggtagacatcgcaggagatgacactcagttcatccataatgcgacgccagctctctttcggctccggcggtggcagcaggttggcttccagaatcgccccggtataaaggctcaggctgctgacggtgatttctggcagaccatatttaaagcggatcatctcgccctgttcggttacgcgcaggccgcctttcaggcttcctggcggttgactcagcagcgccgcatgagcaggtgcgccgccgcgaccaatggaaccgccgcgaccgtggaacaacgtcagctcaatacccgctttttcgcaggttttgattaatgcatcctgtgcctgatattgcgcccaggaagctgccatcactcccgcatcttttgcactgtcggaatagccaatcatcaccatctgtttgccctgaatcaggccacgataccagtcaatattgagcagctgggtcatgacatcgttggcgttgttcagatcatcgagggtttcaaacagcggagcaaccggcatcgcaaacccgatacccgcttctttcagcagcaggtggacagccagtacgtcggacggcgttttcgccatgctgatcacgtaggcggcaatggagccttgcggtgcttcggcaatcacctggcaggtatcgagcacttcgcgcgtttcggcgcttggttgccagttgcgcggcagaagcggacgtttggagttcagttcgcggatcaggaacgcctgtttgtcggcctcactccagctttcgtagtcgccgataccgaggtagcgggtcagctcgcccagcgcttcggtatgacgcgtgctctcctgacggatatcaatacggaccagcggtacgccgaaacatttcacgcggcgcagggtgtcgagcagatcgccgttggcgataatacccatgccacacgcctgaagactctggtagcaagcgtagagcggttcccacagttcttcgttttgtgtcagcaggccttctggttttggcagttcttcgcctttcaggcgcgcttccagccatgcctgtgtcgccatcaggcgagaacgcaggtttttcatcagatagcgatacggttctgcggcaccttcttcgccaaccagcgccagcagttcaggggtcgcttcaaccatgctcagttcagaaaccagcacctgaatatctttcaggaacaaatcggtggctttccagcggctgagtagcaggacgtggcgggtgatatcggcagtgacgttcgggttgccgtcgcggtcgccgcccatccagctagtaaaacggaccggaacaaattcgacgggcagtttgtagccgaggttctcttccagttgttcgttcagttcgcgcaggtaatttggtacgccttgccacaggctgttttccactacggcaaagccccatttggcttcatctaccgggcttggacgcagcttacggatttcatcggtatgccaactctgggcgatcaactggcgcaggcgacgcatcagctggttgtgttcgtagtcagcgatatctttgttatcgagctgttttaaacaggcgttcacttccaccattttgtggatcagtgtacgacgggtaatttcggttgggtgagccgtgaggaccagttccaggctcaggctttccactgcttttttgatggtgtcttcgctcagttccggctggtttttcagtttacgcagggtgcgggcgatcacttccgggttgctggcagcttcgcctttcgggctaatgctgtggtattgctcggcggtgttggccaggttcaggaactgactaaacgcacgcgcaacgggcagcagctcgtcgttgctcaaattttgtaaggtggtgagcaactcctggcggttagcatcattgccagcgcgactagatttgctcaacttacggatagtttctacgcgttcaagaatgtgttctcccaacgcatccttgatggtttctcccagcactttgccgagcatactgacattactacgcaatgcggaatattgttcgttcatattaccccagacaccccatcttatcgtttgatagccctgtatccttcacgtcgcattggcgcgaatatgctcgggctttgcttttcgtcgtcttttataaagccacgtaaaagcggtgacgtcaaatgctgcgaaatcgcttcagcaaacgaataaatagcaggaatttacgtcattaaattcacgacgctttaaataagcgtaacttatggaaatgttaaaaaatcgccccaagtaacaccaaaggtgtaggtcggataagatgcgcaagtatcgcatccgacattattgcggcactggagtttggcaacagtgccggatgcggcgcgagcgccttatccggcctacagttgggcatcgtttgagtcactgtcggtcggataagatgcgcaagtatcgcatccgacattattgcggcactggagtttggcaacagtgccggatgcggcgcgagcgccttatccggcctacggttgggcatcgtttgagtcactgtaggtcggataagatgcgcaagcatcgcatccgacattattgcggcactggagtttggcaacagcgccggatgcggcgcgagcgccttatccggcctacgttttaatgccagcaaaaatggtgaattacctgggttatcagttcgcgggtgggcttgataaaccgtgtttccagatattcatcaggttgatgagcctgattaatactgccaggccccaacaccagcgtcgggcataacgtttgaataaacggcgcttcggtacagtagttcaccacttcggtttttgctccgagcaatttctcaaccacttcaaccagttgatgattcggtgggcattcatagccagggatcggcggatgcagctcgtcgaccgtcagacgacccggccagcgttcgctcaccggagccaatgcatcgttgagcaaaccattaagttcattgagtgtcatgccaggcagcggacgaatatccatatgcaactcacagcaagcgcaaatacggttagaagcgtcgccaccgtgaatatgcccgaggttgagcgtagggtatggcacggtaaacgcttcgtagtgataacgttctttcaggttatcgcgcaattgcaaaatatgcccgatggcgtcgtgcattagttcgatagcgttaactccgcgtgctggatcgctggagtgcccgctctggccctgaatacggatggcgttagagatatgacctttatgtgcgcgtaccggttgtagactcgtcggttcgccaatgatggcgcaatccgggcgcagggcggtagtttcggcaaaataacgcgctccggccatactggtttcttcatcagcagtcgccagaatgtagagcggttttttcagtttcgtgacgtcgacatcgcgtagcgcatcaaggataaacgcaaaaaagcctttcatgtcggcggtgcctaagccgtaaagcttgccgtcatgctccgtcagtgtaaacggatcgcgcgtccagcgaccgtcatcaaatggcaccgtatcggtatgccccgccagcaacaagccgccagccccctgtccgatacttgccagcatattgaatttgttgcgagttcctggaacaggctgcacttccacattgaagcccaaatctttaaaccagtccgccagcagagtgattaaatctgcattgctttgatcgagtgcctcttccgtggcgcttatactaggtgtggcaatcagagcgcggtaaatctcgataaatggcggtaatttgtttttcattgttgacacacctctggtcatgatagtatcaatattcatgcagtatttatgaataaaaatacactaacgttgagcgtaataaaacccaccagccgtaaggtgaatgttttacgtttaacctggcaaccagacataagaaggtgaatagccccgatgttgaatacgctgattgtgggtgccagcggctacgctggcgcagagctagtgacctatgtaaatcgccatccgcatatgaacataaccgctttgactgttagtgcgcaaagcaatgatgcgggaaagttaatctccgatttgcatccgcagctaaaaggcatcgttgatctgccgttgcagccgatgagcgatatcagcgagtttagcccaggggtggacgtagtgtttctcgccaccgcccatgaagttagccacgatttagcgccgcagtttcttgaagcgggctgcgtggtgttcgacctttccggcgcgtttcgtgttaacgacgccaccttctatgaaaaatattacggctttacccatcaatacccggaactgttggaacaggcagcctacggtctggcggagtggtgcggtaataaattaaaagaagcgaatttgattgcggtgccgggctgttatccgacggcggcacagctggcgctgaaaccgttgattgatgccgatcttcttgacctcaatcagtggccggtgatcaacgccaccagcggcgtgagcggtgcagggcgtaaagcggccattagtaacagcttttgtgaagttagcctgcaaccgtatggcgtctttactcatcgccatcaaccagagatcgccacacacctcggtgctgacgttatcttcaccccacatctgggcaatttcccgcgcggcattctcgaaaccattacctgccgcctgaaaagcggtgtgacccaggcgcaagtcgcgcaagtgttacagcaggcgtatgcccataaaccgctggtgcggctgtatgacaaaggcgttccggcgctgaaaaatgtcgttgggctgccattttgcgatatcgggtttgccgttcagggcgagcatctgattattgtggcgaccgaagacaacttactgaaaggcgcggcggcacaagcggtacagtgcgccaatattcgtttcggctatgcggaaacgcagtctcttatttaagggtgcaatgatgaatccattaattatcaaactgggcggcgtactgctggatagtgaagaggcgctggaacgtctgtttagcgcactggtgaattatcgtgagagtcatcagcgtccgctggtgattgtgcacggcggcggttgcgtggtggatgagctgatgaaagggctgaatctgccggtgaaaaagaaaaacggcctgcgggtgacgcctgctgatcagatagacattatcaccggagcactggcgggaacggcaaataaaaccctgttggcatgggcgaagaaacatcagattgcggccgtaggtttgtttctcggtgacggcgacagcgtcaaagtgacccagcttgatgaagagttaggtcatgttggactggcgcagccaggtagccctaagcttatcaactccttgctggagaacggttatctgccggtggtcagctccattggcgtaacagacgaagggcaactgatgaacgtcaatgccgaccaggcggcaacggcgctggcggcaacgctgggcgcggatctgattttgctctccgacgtcagcggcattctcgacggcaaagggcaacgcattgccgaaatgaccgccgcgaaagcagaacaactgattgagcagggcattattactgacggcatgatagtgaaagtgaacgcggcgctggatgcggcccgcacgctgggccgtccggtagatatcgcctcctggcgtcatgcggagcagcttccggcactgtttaacggtatgccgatgggtacgcggattttagcttaagttttgttggccggaggcgcagctttccggcattgaatttcaaaataaggaaacagagttatggcactttggggcgggcgttttacccaggcagcagatcaacggttcaaacaattcaacgacagtctgcgctttgattaccgtctggcggagcaggatattgttggctctgtggcctggtccaaagccctggtcacggtaggcgtgttaaccgcagaagagcaggcgcaactggaagaggcgctgaacgtgttgctggaagatgttcgcgccaggccacaacaaatccttgaaagcgacgccgaagatatccatagctgggtggaaggcaaactgatcgacaaagtgggccagttaggcaaaaagctgcataccgggcgtagccgtaatgatcaggtagcgactgacctgaaactgtggtgcaaagataccgttagcgagttactgacggctaaccggcagctgcaaagcgcgctggtggaaaccgcacaaaacaatcaggacgcggtaatgccaggttacactcacctgcaacgcgcccagccggtgacgttcgcgcactggtgcctggcctatgttgagatgctggcgcgtgatgaaagccgtttgcaggatgcgcttaagcgtctggatgtcagcccgctaggctgtggcgcgctggcgggaacggcctatgaaatcgaccgtgaacagttagcaggctggctgggctttgctagcgcgacccgtaacagtctcgacagcgtttctgaccgtgaccatgtgttggaactgctttctgctgccgctatcggcatggtgcatctgagccgttttgctgaagatctgattttctttaacaccggcgaagcggggtttgtggagctttctgaccgcgtgacttccggtagtagtttaatgccgcagaagaaaaacccggatgcgctggagctgattcgcggtaaatgcggccgggtgcagggggcgttaaccggcatgatgatgacgctgaaaggtttgccgctggcttacaacaaagatatgcaggaagacaaagaaggtctgttcgacgcgctcgatacctggctggactgcctgcatatggcggcgctggtgctggacggcattcaggtgaaacgtccacgttgccaggaagcggctcagcagggttacgccaacgccaccgaactggcggattatctggtggcgaaaggcgtaccgttccgcgaggcgcaccatattgttggtgaagcggtggtggaagccattcgtcagggcaaaccgctggaagatctgccgctcagtgagttgcagaaattcagtcaggtgattgacgaagatgtctatccgattctgagcctgcaaagctgcctcgacaagcgtgcggcaaaaggcggcgtcagtccgcagcaggtggcgcaggcgattgcttttgcgcaggctcggttagggtaagaacatttatatgtataaatttgagcctggcttatcgccgggcttttttatggcaaaaaaaagcggatcctggagatccgcaaaagttcacgttggctttagttattcgagttgagaaactctcgaaacgggcagtgacttcaagggttaaaagaggtgccgctccgtttctgtgagcaattatcagtcagaatgcttgatagggataatcgttcattgctattctacctatcgccatgaactatcgtggcgatggaggatggataatgaatattcgtgatcttgagtacctggtggcattggctgaacaccgccattttcggcgtgcggcagattcctgccacgttagccagccgacgcttagcgggcaaattcgtaagctggaagatgagctgggcgtgatgttgctggagcggaccagccgtaaagtgttgttcacccaggcgggaatgctgctggtggatcaggcgcgtaccgtgctgcgtgaggtgaaagtccttaaagagatggcaagccagcagggcgagacgatgtccggaccgctgcacattggtttgattcccacagttggaccgtacctgctaccgcatattatccctatgctgcaccagacctttccaaagctggaaatgtatctgcatgaagcacagacccaccagttactggcgcaactggacagcggcaaactcgattgcgtgatcctcgcgctggtgaaagagagcgaagcattcattgaagtgccgttgtttgatgagccaatgttgctggctatctatgaagatcacccgtgggcgaaccgcgaatgcgtaccgatggccgatctggcaggggaaaaactgctgatgctggaagatggtcactgtttgcgcgatcaggcaatgggtttctgttttgaagccggggcggatgaagatacacacttccgcgcgaccagcctggaaactctgcgcaacatggtggcggcaggtagcgggatcactttactgccagcgctggctgtgccgccggagcgcaaacgcgatggggttgtttatctgccgtgcattaagccggaaccacgccgcactattggcctggtttatcgtcctggcagtccgctgcgcagccgctatgagcagctggcagaggccatccgcgcaagaatggatggccatttcgataaagttttaaaacaggcggtttaaaccgtttaacgcagctacccgataggcttccgccatcgtcgggtagttaaaggtggtgttgacgaagtactcaatagtgttgccgccacctttctgttccataatcgcctgaccgatatgaataatttcggcagcgcgctcgccaaagcagtgaatacccagaatctcttttgtttcccgatggaacaaaattttcagcgtgcccacgttcatgccgacgatttgtgcgcgtgccagatgtttaaactgggcgcggcccacttcatatggcactttcattgcggtcagctgctgttcggttttgcccacagagctgatttccgggatggtgtaaataccggtagggatatcttcaatcagatgtgcggtggcttcgccttttaccagcgcctgcgcggcaatgcgcccctggtcataggccgcgctcgccaggctcggataaccaatcacgtcgcccaccgcgtaaacgtgtggctgtgcggtctgatacatgctgttgaccttcagctgtccgcggctgtcagtttctagcccaatgttctgtaacgccaggctatcggtattaccggtgcgaccgttggcatagagcaggcagtcagctttcagttttttaccgctcttcagatgcatgatcacaccatcgtcacagccttcgatcttctcgtactcttcgttgtgacgaatcactacgccactgttccagaagtgataggagagagaatcactcatctcttgatcgagaaatgccagcaggcgatcgcgggtgttgatcagatccacttttacatccataccgcggaagatgctcgcatattcacagccgatcactccagcaccatagataagtacatggcgcggttcgtggtgcatgctgagaatactgtcgctgtcgtaaatgcgtggatgggtgaaatcaacatctgttggatgatatggacgagagccgcaggcaataacaaatttttcagcggttagtgtttcaacgctgccgtccgggcaatccagcgccaacgtatgctcgtcaacaaagcgagcgtttccctgcaatatttcacagtgattacgttcgtaaaatccctgacgcatgcgcgtttgttgattaatcacgttatcggcatggttaaggatatcggcaaaagaagagcggagcagtcgggaatggtcgctgtaaagtgggttttgattgaattctataatgcggctgacggcgtgacggagagctttgctcgggatggtgccccagtgggtgcaaccgccgccaacattttgataacgctcgataactgcgacgcgcgcaccttgcttaaccaggcccattgcagcgccttcgccgccggggccggaacctattactatggcatcgtaatcgtaggaatgtggcatggtagggcttacctgttcttatacataaaagcaacagaatggtaacattttatcgcgggtaagccaattgatccccgtcatttatctggctatatcctgagcggcctttgctttgtctgtttcttacttttgccctgacgttttattggatttttatcgacgatactctccgtttaagcggcaggtttccgctgtacgtaaaagaaccggccaaagaattgcagtaaatatgttttattgcgttaccgttcattcacaatactggagcaatccagtatgttcattctctggtatagtgccagcagtacttttggcaaggatagtgacatcgtgatgggcgtaagagcgcaacaaaaagaaaaaacccgccgtagcctggtggaagccgcatttagccaattaagtgctgaacgcagcttcgccagcctgagtttgcgtgaagtggcgcgtgaagcgggcattgctcccacctctttttatcggcatttccgcgacgtagacgaactgggtctgaccatggttgatgagagcggtttaatgctacgccaactcatgcgccaggcgcgtcagcgtatcgccaaaggcgggagtgtgatccgcaccagcgtctccacatttatggagttcatcggtaataatcctaacgccttccggttattattgcgggaacgctccggcacctccgctgcgtttcgtgccgccgttgcgcgtgaaattcagcacttcattgcggaacttgcggactatctggaactcgaaaaccatatgccgcgtgcgtttactgaagcgcaagccgaagcaatggtgacaattgtcttcagtgcgggtgccgaggcgttggacgtcggcgtcgaacaacgtcggcaattagaagagcgactggtactgcaactgcgaatgattagcaaaggggcttattactggtatcgccgtgaacaagagaaaaccgcaattattccgggaaatgtgaaggacgagtaatgaaacaagcaaatcaagatagaggtacgctgctgctggcgttagttgctggcttaagcattaatggtactttcgcagcgctgtttagctccattgtgccattttctgtattcccgattatttccctggtgctgacggtttactgcctgcatcaacgttatcttaatcgcactatgccggtaggcttgccgggtctggcagctgcctgttttattctcggcgtactgctgtacagcacggtagttcgtgcggaatatccggatatcggctctaacttcttcccggcagtactctccgtcattatggtgttctggattggcgcgaagatgcgtaaccgtaagcaggaagttgctgagtaatcggtattatgccggatgctggcgcatccggcatgggttttacttcgcggtcagtaatacgccgcactccatatggtgcgtgtaggggaactgatcaaacagagccagacgttcgaccttgtgcgtctggcttaatgtttccagattcttgcataacgtttccgggttacaggagatgtacaaaatacgcggatacgcctgcaccattttctcggtttcactgtccagaccgctgcgcggagggtcgacaaaaatggtttcgcactgataactctttaagtcgatcccttgcaggcggttaaactcgcgcacaccattcatcgcctgagtaaattcttctgccgccatacgaataatttgtacgttatcaatatggttagctgcgatgttgtattgcgcagcagcaacgctcggcttagcgatttcggtggctaatacccgatcaaaattacgcgccagcgctaaactaaagttaccgttgccgcagtacagctccagtaaatcgcctttactgcctttggttacgtccagcgcccattccagcatctgaatattcatcgccgcgttcggctgggtaaagctgttttctacctgacggtagatcatctctttccctgcgaccggcagacgttcatcgatgtaatcctgatccagctcgattttggttttcgttgcccgaccaatcagatgcacattcagattctgcgcgcgcagtgcatcgcgcagggcctccgcttcctgacgccactcatcatccagcttcttatggtatagcagggaaaccaccgcctgattactcagtgtagtgaggtaatcaatctggaacaacttgtggcgcagaacgggattattacgcacacccgcaatcatcgccgtcatcaactggttgataagttcactggcggcggggaagctatccacgcggatgcggcttttggtttgttgatcgaaaatgatgtgatacaggtcatcgccatcgtgccagatgcggaactccgcgcgcatccggtaatgactgaccgggctgcgaaacacttccggaaccaggtcagaaaacggtgccatcatactttgcaaacgtaccactttttcggctaactgcgcttcatactgttctgttggaaggtgttcgggggtcatgatgtatcctgaaaaattaaagtacgcggcgattgtagggattgctcatcagatgtccagatcttgatgaattcctatttgtgagctacgtctggacagtaacttgttacaacctgtagcatccacttgccggtcctgtgagttaatagggaatccagtgcgaatctggagctgacgcgcagcggtaaggaaaggtgcgatgattgcgttatgcggacactgccattcggtgggaagtcatcatctcttagtatcttagatacccctccaagcccgaagacctgccggccaacgtcgcatctggttctcatcatcgcgtaatattgatgaaacctgcggcatccttcttctattgtggatgctttacaatgattaaaaaagctagcctgctgacggcgtgttccgtcacggcattttccgcttgggcacaggataccagcccggatactctcgtcgttactgctaaccgttttgaacagccgcgcagcactgtgcttgcaccaaccaccgttgtgacccgtcaggatatcgaccgctggcagagcaccagcgtcaatgatgtgctgcgccgtcttccgggcgtcgatatcacccaaaacggcggtagtggtcagctcagttctatttttattcgcggtacaaatgccagtcatgtgttggtgttaattgatggcgtacgcctgaatctggcgggggtgagtggttctgccgaccttagccagttccctattgcgcttgtccagcgtgttgaatatatccgtgggccgcgctccgctgtttatggttccgatgcaataggcggggtggtgaatatcatcacgacgcgcgatgaacccggaacggaaattagtgcagggtggggaagcaatagttatcagaactatgatgtctctacgcagcaacaactgggggataagacacgggtaacgctgttgggcgattatgcccatactcatggttatgatgttgttgcctatggtaataccggaacgcaagcgcagacagataacgatggttttttaagtaaaacgctttatggcgcgctggagcataactttactgatgcctggagcggctttgtgcgcggctatggctatgataaccgtaccaattatgacgcgtattattctcccggtagtccgttgctcgatacccgtaaactctatagccaaagttgggacgccgggctgcgctataacggcgaactgattaaaagtcaactcattaccagctatagccatagcaaagattacaactacgatccccattatggtcgttatgatagcagcgcgacgctcgatgagatgaagcaatacaccgtccagtgggcaaacaatgtcatcgttggtcacggtagtattggtgcgggtgtcgactggcagaaacagactacgacgccgggtacaggttatgttgaggatggatatgatcaacgtaataccggcatctatctgaccgggctgcaacaagtcggcgattttacctttgaaggcgcagcacgcagtgacgataacagtcagtttggtcgtcatggaacctggcaaaccagcgccggttgggaattcatcgaaggttatcgcttcattgcttcctacgggacatcttataaggcaccaaatctggggcaactgtatggcttctacggaaatccgaatctggacccggagaaaagcaaacagtgggaaggcgcgtttgaaggcttaaccgctggggtgaactggcgtatttccggatatcgtaacgatgtcagtgacttgatcgattatgatgatcacaccctgaaatattacaacgaagggaaagcgcggattaagggcgtcgaggcgaccgccaattttgataccggaccactgacgcatactgtgagttatgattatgtcgatgcgcgcaatgcgattaccgacacgccgttgttacgccgtgctaaacagcaggtgaaataccagctcgactggcagttgtatgacttcgactggggtattacttatcagtatttaggcactcgctatgataaggattacagttcttatccttatcaaaccgttaaaatgggcggtgtgagcttgtgggatcttgcggttgcgtatccggtcacctctcacctgacagttcgtggtaaaatagccaacctgttcgacaaagattatgagacagtctatggctaccaaactgcaggacgggaatacaccttgtctggcagctacaccttctgaaccacgtcccaccgtgctggtgtttgactccggcgtcggtgggttgagcgtctatgacgagatccggcatctcttaccggatctccattacatttatgctttcgataacgtcgctttcccgtatggcgaaaaaagcgaagcgtttattgttgagcgagtggtggcaattgtcaccgcggtgcaagaacgttatccccttgcgctggctgtggtcgcttgcaacactgccagtaccgttagtcttcctgcattacgcgaaaagttcgacttcccggttgttggtgtcgtgccggcgattaaacctgctgcacgtctgacggcaaatggcattgtcggattactggcaacccgcggaacagttaaacgttcttatactcatgagctgatcgcgcgtttcgctaatgaatgccagatagaaatgctgggcagcgcagagatggttgagttggctgaagcgaagctacatggcgaagatgtttctctggatgcactaaaacgtatcctacgcccgtggttaagaatgaaagagccgccagataccgttgtattgggttgcacccatttccctctactacaagaagaactgttacaagtgctgccagagggaacccggctggtggattctggcgcagcgattgctcgccgaacggcctggttgttagaacatgaagccccggatgcaaaatctgccgatgcgaatattgccttttgtatggcaatgacgccaggagctgaacaattattgcccgttttacagcgttacggcttcgaaacgctcgaaaaactggcagttttaggctgatttggttgaatgttgcgcggtcagaaaattattttaaatttcctcttgtcaggccggaataactccctataatgcgccaccactgacacggaacaacggcaaacacgccgccgggtcagcggggttctcctgagaactccggcagagaaagcaaaaataaatgcttgactctgtagcgggaaggcgtattatgcacaccccgcgccgctgagaaaaagcgaagcggcactgctctttaacaatttatcagacaatctgtgtgggcactcgaagatacggattcttaacgtcgcaagacgaaaaatgaataccaagtctcaagagtgaacacgtaattcattacgaagtttaattctttgagcgtcaaacttttaaattgaagagtttgatcatggctcagattgaacgctggcggcaggcctaacacatgcaagtcgaacggtaacaggaagaagcttgcttctttgctgacgagtggcggacgggtgagtaatgtctgggaaactgcctgatggagggggataactactggaaacggtagctaataccgcataacgtcgcaagaccaaagagggggaccttcgggcctcttgccatcggatgtgcccagatgggattagctagtaggtggggtaacggctcacctaggcgacgatccctagctggtctgagaggatgaccagccacactggaactgagacacggtccagactcctacgggaggcagcagtggggaatattgcacaatgggcgcaagcctgatgcagccatgccgcgtgtatgaagaaggccttcgggttgtaaagtactttcagcggggaggaagggagtaaagttaatacctttgctcattgacgttacccgcagaagaagcaccggctaactccgtgccagcagccgcggtaatacggagggtgcaagcgttaatcggaattactgggcgtaaagcgcacgcaggcggtttgttaagtcagatgtgaaatccccgggctcaacctgggaactgcatctgatactggcaagcttgagtctcgtagaggggggtagaattccaggtgtagcggtgaaatgcgtagagatctggaggaataccggtggcgaaggcggccccctggacgaagactgacgctcaggtgcgaaagcgtggggagcaaacaggattagataccctggtagtccacgccgtaaacgatgtcgacttggaggttgtgcccttgaggcgtggcttccggagctaacgcgttaagtcgaccgcctggggagtacggccgcaaggttaaaactcaaatgaattgacgggggcccgcacaagcggtggagcatgtggtttaattcgatgcaacgcgaagaaccttacctggtcttgacatccacggaagttttcagagatgagaatgtgccttcgggaaccgtgagacaggtgctgcatggctgtcgtcagctcgtgttgtgaaatgttgggttaagtcccgcaacgagcgcaacccttatcctttgttgccagcggtccggccgggaactcaaaggagactgccagtgataaactggaggaaggtggggatgacgtcaagtcatcatggcccttacgaccagggctacacacgtgctacaatggcgcatacaaagagaagcgacctcgcgagagcaagcggacctcataaagtgcgtcgtagtccggattggagtctgcaactcgactccatgaagtcggaatcgctagtaatcgtggatcagaatgccacggtgaatacgttcccgggccttgtacacaccgcccgtcacaccatgggagtgggttgcaaaagaagtaggtagcttaaccttcgggagggcgcttaccactttgtgattcatgactggggtgaagtcgtaacaaggtaaccgtaggggaacctgcggttggatcacctccttaccttaaagaagcgtactttgtagtgctcacacagattgtctgatagaaagtgaaaagcaaggcgtttacgcgttgggagtgaggctgaagagaataaggccgttcgctttctattaatgaaagctcaccctacacgaaaatatcacgcaacgcgtgataagcaattttcgtgtccccttcgtctagaggcccaggacaccgccctttcacggcggtaacaggggttcgaatcccctaggggacgccacttgctggtttgtgagtgaaagtcgccgaccttaatatctcaaaactcatcttcgggtgatgtttgagatatttgctctttaaaaatctggatcaagctgaaaattgaaacactgaacaacgagagttgttcgtgagtctctcaaattttcgcaacacgatgatgaatcgaaagaaacatcttcgggttgtgaggttaagcgactaagcgtacacggtggatgccctggcagtcagaggcgatgaaggacgtgctaatctgcgataagcgtcggtaaggtgatatgaaccgttataaccggcgatttccgaatggggaaacccagtgtgtttcgacacactatcattaactgaatccataggttaatgaggcgaaccgggggaactgaaacatctaagtaccccgaggaaaagaaatcaaccgagattcccccagtagcggcgagcgaacggggagcagcccagagcctgaatcagtgtgtgtgttagtggaagcgtctggaaaggcgcgcgatacagggtgacagccccgtacacaaaaatgcacatgctgtgagctcgatgagtagggcgggacacgtggtatcctgtctgaatatggggggaccatcctccaaggctaaatactcctgactgaccgatagtgaaccagtaccgtgagggaaaggcgaaaagaaccccggcgaggggagtgaaaaagaacctgaaaccgtgtacgtacaagcagtgggagcacgcttaggcgtgtgactgcgtaccttttgtataatgggtcagcgacttatattctgtagcaaggttaaccgaataggggagccgaagggaaaccgagtcttaactgggcgttaagttgcagggtatagacccgaaacccggtgatctagccatgggcaggttgaaggttgggtaacactaactggaggaccgaaccgactaatgttgaaaaattagcggatgacttgtggctgggggtgaaaggccaatcaaaccgggagatagctggttctccccgaaagctatttaggtagcgcctcgtgaattcatctccgggggtagagcactgtttcggcaagggggtcatcccgacttaccaacccgatgcaaactgcgaataccggagaatgttatcacgggagacacacggcgggtgctaacgtccgtcgtgaagagggaaacaacccagaccgccagctaaggtcccaaagtcatggttaagtgggaaacgatgtgggaaggcccagacagccaggatgttggcttagaagcagccatcatttaaagaaagcgtaatagctcactggtcgagtcggcctgcgcggaagatgtaacggggctaaaccatgcaccgaagctgcggcagcgacgcttatgcgttgttgggtaggggagcgttctgtaagcctgcgaaggtgtgctgtgaggcatgctggaggtatcagaagtgcgaatgctgacataagtaacgataaagcgggtgaaaagcccgctcgccggaagaccaagggttcctgtccaacgttaatcggggcagggtgagtcgacccctaaggcgaggccgaaaggcgtagtcgatgggaaacaggttaatattcctgtacttggtgttactgcgaaggggggacggagaaggctatgttggccgggcgacggttgtcccggtttaagcgtgtaggctggttttccaggcaaatccggaaaatcaaggctgaggcgtgatgacgaggcactacggtgctgaagcaacaaatgccctgcttccaggaaaagcctctaagcatcaggtaacatcaaatcgtaccccaaaccgacacaggtggtcaggtagagaataccaaggcgcttgagagaactcgggtgaaggaactaggcaaaatggtgccgtaacttcgggagaaggcacgctgatatgtaggtgaggtccctcgcggatggagctgaaatcagtcgaagataccagctggctgcaactgtttattaaaaacacagcactgtgcaaacacgaaagtggacgtatacggtgtgacgcctgcccggtgccggaaggttaattgatggggttagcgcaagcgaagctcttgatcgaagccccggtaaacggcggccgtaactataacggtcctaaggtagcgaaattccttgtcgggtaagttccgacctgcacgaatggcgtaatgatggccaggctgtctccacccgagactcagtgaaattgaactcgctgtgaagatgcagtgtacccgcggcaagacggaaagaccccgtgaacctttactatagcttgacactgaacattgagccttgatgtgtaggataggtgggaggctttgaagtgtggacgccagtctgcatggagccgaccttgaaataccaccctttaatgtttgatgttctaacgttgacccgtaatccgggttgcggacagtgtctggtgggtagtttgactggggcggtctcctcctaaagagtaacggaggagcacgaaggttggctaatcctggtcggacatcaggaggttagtgcaatggcataagccagcttgactgcgagcgtgacggcgcgagcaggtgcgaaagcaggtcatagtgatccggtggttctgaatggaagggccatcgctcaacggataaaaggtactccggggataacaggctgataccgcccaagagttcatatcgacggcggtgtttggcacctcgatgtcggctcatcacatcctggggctgaagtaggtcccaagggtatggctgttcgccatttaaagtggtacgcgagctgggtttagaacgtcgtgagacagttcggtccctatctgccgtgggcgctggagaactgaggggggctgctcctagtacgagaggaccggagtggacgcatcactggtgttcgggttgtcatgccaatggcactgcccggtagctaaatgcggaagagataagtgctgaaagcatctaagcacgaaacttgccccgagatgagttctccctgaccctttaagggtcctgaaggaacgttgaagacgacgacgttgataggccgggtgtgtaagcgcagcgatgcgttgagctaaccggtactaatgaaccgtgaggcttaaccttacaacgccgaagctgttttggcggatgagagaagattttcagcctgatacagattaaatcagaacgcagaagcggtctgataaaacagaatttgcctggcggcagtagcgcggtggtcccacctgaccccatgccgaactcagaagtgaaacgccgtagcgccgatggtagtgtggggtctccccatgcgagagtagggaactgccaggcatcaaataaaacgaaaggctcagtcgaaagactgggcctttcgttttatctgttgtttgtcggtgaacgctctcctgagtaggacaaatccgccgggagcggatttgaacgttgcgaagcaacggcccggagggtggcgggcaggacgcccgccataaactgccaggcatcaaattaagcagaaggccatcctgacggatggcctttttgcgtttctacaaactcttcctgtcgtcatatctacaagccatccccccacagatacggtaaactagcctcgtttttgcatcaggaaagcagctatgaaccactccttaaaaccctggaacacatttggcattgatcataatgctcagcacattgtatgtgccgaagacgaacaacaattactcaatgcctggcagtatgcaaccgcagaaggacaacccgttcttattctgggtgaaggaagtaatgtactttttctggaggactatcgcggcacggtgatcatcaaccggatcaaaggtatcgaaattcatgatgaacctgatgcgtggtatttacatgtaggagccggagaaaactggcatcgtctggtaaaatacactttgcaggaaggtatgcctggtctggaaaatctggcattaattcctggttgtgtcggcagtagtcctatccagaatattggtgcttatggcgtagaattacagcgagtttgcgcttatgttgattctgttgaactggcgacaggcaagcaagtgcgcttaactgccaaagagtgccgttttggctatcgcgacagtatttttaaacatgaataccaggaccgcttcgctattgtagccgtaggtctgcgtctgccaaaagagtggcaacctgtactaacgtatggtgacttaactcgtctggatcctacaacagtaacgccacagcaagtatttaatgcggtgtgtcatatgcgcaccaccaaactccctgatccaaaagtgaatggcaatgccggtagtttcttcaaaaaccctgttgtatctgccgaaacggctaaagcattactgagtcaatttccaacagcaccaaattacccccaggcggatggtagtgtaaaactggcagcaggttggcttatcgatcagtgccagctaaaagggatgcaaataggtggggctgcggtgcaccgtcaacaggcgttagttctcattaatgaagacaatgcaaaaagcgaagatgttgtacagctggcgcatcatgtaagacagaaagttggtgaaaaatttaatgtctggcttgagcctgaagtccgctttattggtgcaagtggtgaagtgagcgcagtggagacaattagttgaaataaagcgcagtggagacaatttcatgaaggataacaccgtgccactgaaattgattgccctgttagcgaacggtgaatttcactctggcgagcagttgggtgaaacgctgggaatgagccgggcggctattaataaacacattcagacactgcgtgactggggcgttgatgtctttaccgttccgggtaaaggatacagcctgcctgagcctatccagttacttaatgctaaacagatattgggtcagctggatggcggtagtgtagccgtgctgccagtgattgactccacgaatcagtaccttcttgatcgtatcggagagcttaaaagcggcgatgcttgcattgcagaataccagcaggctggccgtggtcgccggggtcggaaatggtttagcccttttggcgcaaacttatatttgagcatgttctggcgtctggaacaaggcccggcggcggcgattggtttaagtctggttatcggtatcgtgatggcggaagtattacgcaagctgggtgcagataaagttcgtgttaaatggcctaatgacctctatctgcaggatcgcaagctggcaggcattctggtggagctgactggcaaaactggcgatgcggcgcaaatagtcattggagccgggatcaacatggcaatgcgccgtgttgaagagagtgtcgttaatcaggggtggatcacgctgcaggaagcggggatcaatctcgatcgtaatacgttggcggccatgctaatacgtgaattacgtgctgcgttggaactcttcgaacaagaaggattggcaccttatctgagccgctgggaaaagctggataattttattaatcgcccagtgaaacttatcattggtgataaagaaatatttggcattagtcgcggaatagacaaacagggggctttattacttgagcaggatggaataataaaaccctggatgggcggtgaaatatccctgcgtagtgcagaaaaataagaaaggggagtattcgctcccctgcaaattatttgcgtagtctgacctcttctaccgcatgattagcacttttcgtcaggattaaactggcgcgctcacgagtaggtagaatattttgctttaagttcagccagttgatctctttccacaatgtcatggcagtcttaatcgcttcttctttagttaatttcgcgtagttatgaaaataggaatccgggtcggtaaaagccccttcgcggaatttcagaaaacggttgatataccatgtctgaagtaagtcttccggtgcatcaacatatatgctaaaatcgacaaaatcagaaacaaatacatgatgtggatcgtgtggataatccatcccgctctgtaagacatttaacccttcaagaattaaaatatcaggctgaacaaccgttttatctccatccgggatcacatcataaataagatgactgtaaacaggtgctgtaacgtttggcacgccggatttgagatcggaaacaaacttcaccaggcgatgcatatcatagctttccgggaagcctttcttcttcatcagaccacgttctttcagaacctgattagggtgaaggaagccatctgtagtgatcagttcaacacgacgatgttccggccaacggcttaatagcgcctgcaatacacgggcggttgtacttttccccaccgcgacactgccagcaatactgataatgtaaggaatgcgttgcccgttggtaccaagaaactgttccagaactgcctgacggcgcagattgctgcttatatagaagttcagcaaacgactcaaaggtaaatagatctcggcaacttcttctaagctgagatcttcattaatacctttgagacgggcgatctcatcttcgcttaacgtcataggtacggaatcacgcagagctgcccactggttgcggtcaaactgtaggtaaggcgtcattaacgtttgctcttttatactcataagcatgtttctggcggtcatagctctatcggcaaagcgatatttgccatggcgcgtcacagttctgttgaatgggttaatgggcaggagggtaacaccagatggggaggaataataagaaaaaatctctgccaggaagctatcgttgaaaagcaatgtgacagatattccatctgataaaaagaattatggtttagcaggagcgcattgttgagcacaatgatgttgaaaaagtgtgctaatctgccctccgttcggctgtttcttcatcgtgtcgcataaaatgtgaccaataaaacaaattatgcaattttttagttgcatgaactcgcatgtctccatagaatgcgcgctacttgatgccgacttagctcagtaggtagagcaactgacttgtaatcagtaggtcaccagttcgattccggtagtcggcaccatcaagtccggtggggttcccgagcggccaaagggagcagactgtaaatctgccgtcacagacttcgaaggttcgaatccttcccccaccaccaatttcggccacgcgatggcgtagcccgagacgataagttcgcttaccggctcgaataaagagagcttctctcgatattcagtgcagaatgaaaatcaggtagccgagttccaggatgcgggcatcgtataatggctattacctcagccttccaagctgatgatgcgggttcgattcccgctgcccgctccaagatgtgctgatatagctcagttggtagagcgcacccttggtaagggtgaggtcggcagttcgaatctgcctatcagcaccacttcttttctcctccctgttttttccttctgtttattgcattcaacaagtcgggcatgttgcctggttgatgtggtgatatcaccgatttatccgtgtcttagagggacaatcgatgtctaaagaaaagtttgaacgtacaaaaccgcacgttaacgtcggtactatcggccacgttgaccatggtaaaacaacgctgaccgctgcaatcactaccgtactggctaaaacctacggcggtgctgctcgcgcattcgaccagatcgataacgcgccggaagaaaaagctcgtggtatcaccatcaacacttctcacgttgaatacgacaccccgacccgtcactacgcacacgtagactgcccggggcacgccgactatgttaaaaacatgatcaccggtgctgcgcagatggacggcgcgatcctggtagttgctgcgactgacggcccgatgccgcagactcgtgagcacatcctgctgggtcgtcaggtaggcgttccgtacatcatcgtgttcctgaacaaatgcgacatggttgatgacgaagagctgctggaactggttgaaatggaagttcgtgaacttctgtctcagtacgacttcccgggcgacgacactccgatcgttcgtggttctgctctgaaagcgctggaaggcgacgcagagtgggaagcgaaaatcctggaactggctggcttcctggattcttacattccggaaccagagcgtgcgattgacaagccgttcctgctgccgatcgaagacgtattctccatctccggtcgtggtaccgttgttaccggtcgtgtagaacgcggtatcatcaaagttggtgaagaagttgaaatcgttggtatcaaagagactcagaagtctacctgtactggcgttgaaatgttccgcaaactgctggacgaaggccgtgctggtgagaacgtaggtgttctgctgcgtggtatcaaacgtgaagaaatcgaacgtggtcaggtactggctaagccgggcaccatcaagccgcacaccaagttcgaatctgaagtgtacattctgtccaaagatgaaggcggccgtcatactccgttcttcaaaggctaccgtccgcagttctacttccgtactactgacgtgactggtaccatcgaactgccggaaggcgtagagatggtaatgccgggcgacaacatcaaaatggttgttaccctgatccacccgatcgcgatggacgacggtctgcgtttcgcaatccgtgaaggcggccgtaccgttggcgcgggcgttgtagcaaaagttctgagctaattgccgataacatttgacgcaatgcgcactaaaagggcatcatttgatgccctttttgcacgctttcgtaccagaacctggctcatcagtgattttctttgtcataatcattgctgagacaggctctgttgagggcgtataatccgaaaagctaatacgcgtttcgatttggtttgcctcgcgatcgcggggtgaaaatgtttgtagaaaacttctgacaggttggtttatgagtgcgaataccgaagctcaaggaagcgggcgcggcctggaagcgatgaagtgggtcgttgtggtggcattgctcctggtggcgattgtcggcaactatctttatcgcgacattatgctgccgctgcgtgcgctggccgtagtaattctgattgctgcagcgggtggtgtcgcgctgttaacgacaaaaggtaaagctaccgttgcttttgcccgtgaagcgcgtaccgaagtccgtaaggtcatttggccgactcgccaggaaacattgcacaccacgctgattgtggctgcggttaccgcagtaatgagtctgatcctgtggggactggatggtattctggttcgcctggtatcctttatcactggcctgaggttctgagatgtctgaagctcctaaaaagcgctggtacgtcgttcaggcgttttccggttttgaaggccgcgtagcaacgagcctgcgtgagcatatcaaattacacaacatggaagatttgtttggtgaagtcatggtaccaaccgaagaagtggttgaaatccgtggcggtcagcgtcgcaaaagcgaacgtaaattcttccctggctacgtcctcgttcagatggtgatgaacgacgcgagctggcacctggtgcgcagcgtaccgcgtgtgatgggcttcatcggcggtacttccgatcgtcctgcgccaatcagcgataaagaagtcgatgcgattatgaaccgcctgcagcaggttggtgataagccgcgtccgaaaacgctgtttgaaccgggtgaaatggtccgtgttaatgatggtccgttcgctgacttcaacggtgttgttgaagaagtggattacgagaaatctcgtctgaaagtgtctgtttctatcttcggtcgtgcgaccccggtagagctggacttcagccaggttgaaaaagcctaacccagcgatcaaaaaagcggcgatttaatcgttgcacaaggcgtgagattggaatacaatttcgcgccttttgtttttatgggccttgcccgtaaaacgattttttatatcacggggagcctctcagaggcgttattacccaacttgaggaatttataatggctaagaaagtacaagcctatgtcaagctgcaggttgcagctggtatggctaacccgagtccgccagtaggtccggctctgggtcagcagggcgtaaacatcatggaattctgcaaagcgttcaacgcaaaaactgattccatcgaaaaaggtctgccgattccggtagtaatcaccgtttacgctgaccgttctttcactttcgttaccaagaccccgccggcagcagttctgctgaaaaaagcggctggtatcaagtctggttccggtaagccgaacaaagacaaagtgggtaaaatttcccgcgctcagctgcaggaaatcgcgcagaccaaagctgccgacatgactggtgccgacattgaagcgatgactcgctccatcgaaggtactgcacgttccatgggcctggtagtggaggactaagaaatggctaaactgaccaagcgcatgcgtgttatccgcgagaaagttgatgcaaccaaacagtacgacatcaacgaagctatcgcactgctgaaagagctggcgactgctaaattcgtagaaagcgtggacgtagctgttaacctcggcatcgacgctcgtaaatctgaccagaacgtacgtggtgcaactgtactgccgcacggtactggccgttccgttcgcgtagccgtatttacccaaggtgcaaacgctgaagctgctaaagctgcaggcgcagaactggtaggtatggaagatctggctgaccagatcaagaaaggcgaaatgaactttgacgttgttattgcttctccggatgcaatgcgcgttgttggccagctgggccaggttctgggtccgcgcggcctgatgccaaacccgaaagtgggtactgtaacaccgaacgttgctgaagcggttaaaaacgctaaagctggccaggttcgttaccgtaacgacaaaaacggcatcatccacaccaccatcggtaaagtggactttgacgctgacaaactgaaagaaaacctggaagctctgctggttgcgctgaaaaaagcaaaaccgactcaggcgaaaggcgtgtacatcaagaaagttagcatctccaccaccatgggtgcaggtgttgcagttgaccaggctggcctgagcgcttctgtaaactaatgcctttacgtgggcggtgattttgtctacaatcttacccccacgtataatgcttaatgcagacgtatatccgagatattcgggttgtggcaaggcggcaactgagtgagtcgccaggagcatagctaactatgtgactggtgcgaatgaaggaagccaacgccgtcacaagctgaatagcgacggatagaaaagatttgttcgttggagcctggcctatccaggcctccgtcgaagaccgcaggagtttcgcaagaaacttaatcccctgcgtagacggtgacagaacgctaagattattcttttatattctggcttgtttctgctcaccgtaattaagacgctctctccgtttggaggagtgaagtgagttccagagattttctctggcaaacatccaggagcaaagctaatggctttaaatcttcaagacaaacaagcgattgttgctgaagtcagcgaagtagccaaaggcgcgctgtctgcagtagttgcggattcccgtggcgtaactgtagataaaatgactgaactgcgtaaagcaggtcgcgaagctggcgtatacatgcgtgttgttcgtaacaccctgctgcgccgtgctgttgaaggtactccgttcgagtgcctgaaagacgcgtttgttggtccgaccctgattgcatactctatggaacacccgggcgctgctgctcgtctgttcaaagagttcgcgaaagcgaatgcaaaatttgaggtcaaagccgctgcctttgaaggtgagctgatcccggcgtctcagatcgaccgcctggcaactctgccgacctacgaagaagcaattgcacgcctgatggcaaccatgaaagaagctagcgctggcaaactggttcgtactctggctgctgtacgcgatgcgaaagaagctgcttaatcgcagttatctttttaacgcattcgcttacgtataaacttattctgatattcaggaacaatttaaatgtctatcactaaagatcaaatcattgaagcagttgcagctatgtctgtaatggacgttgtagaactgatctctgcaatggaagaaaaattcggtgtttccgctgctgctgctgtagctgtagctgctggcccggttgaagctgctgaagaaaaaactgaattcgacgtaattctgaaagctgctggcgctaacaaagttgctgttatcaaagcagtacgtggcgcaactggcctgggtctgaaagaagctaaagacctggtagaatctgcaccggctgctctgaaagaaggcgtgagcaaagacgacgcagaagcactgaaaaaagctctggaagaagctggcgctgaagttgaagttaaataagccaacccttccggttgcagcctgagaaatcaggctgatggctggtgactttttagtcaccagcctttttgcgctgtaaggcgccagtagcgtttcacactgtttgactactgctgtgcctttcaatgcttgtttctatcgacgacttaatatactgcgacaggacgtccgttctgtgtaaatcgcaatgaaatggtttaagcgtgatagcaacaggcattgcggaaagtgttccattttccggtcaacaaaatagtgttgcacaaactgtccgctcaatggacagatgggtcgacttgtcagcgagctgaggaaccctatggtttactcctataccgagaaaaaacgtattcgtaaggattttggtaaacgtccacaagttctggatgtaccttatctcctttctatccagcttgacagctttcagaaatttatcgagcaagatcctgaagggcagtatggtctggaagctgctttccgttccgtattcccgattcagagctacagcggtaattccgagctgcaatacgtcagctaccgccttggcgaaccggtgtttgacgtccaggaatgtcaaatccgtggcgtgacctattccgcaccgctgcgcgttaaactgcgtctggtgatctatgagcgcgaagcgccggaaggcaccgtaaaagacattaaagaacaagaagtctacatgggcgaaattccgctcatgacagacaacggtacctttgttatcaacggtactgagcgtgttatcgtttcccagctgcaccgtagtccgggcgtcttctttgactccgacaaaggtaaaacccactctagcggtaaagtgctgtataacgcgcgtatcatcccttaccgtggttcctggctggacttcgaattcgatccgaaggacaacctgttcgtacgtatcgaccgtcgccgtaaactgcctgcgaccatcattctgcgcgccctgaactacaccacagagcagatcctcgacctgttctttgaaaaagttatctttgaaatccgtgataacaagctgcagatggaactggtgccggaacgcctgcgtggtgaaaccgcatcttttgacatcgaagctaacggtaaagtgtacgtagaaaaaggccgccgtatcactgcgcgccacattcgccagctggaaaaagacgacgtcaaactgatcgaagtcccggttgagtacatcgcaggtaaagtggttgctaaagactatattgatgagtctaccggcgagctgatctgcgcagcgaacatggagctgagcctggatctgctggctaagctgagccagtctggtcacaagcgtatcgaaacgctgttcaccaacgatctggatcacggcccatatatctctgaaaccttacgtgtcgacccaactaacgaccgtctgagcgcactggtagaaatctaccgcatgatgcgccctggcgagccgccgactcgtgaagcagctgaaagcctgttcgagaacctgttcttctccgaagaccgttatgacttgtctgcggttggtcgtatgaagttcaaccgttctctgctgcgcgaagaaatcgaaggttccggtatcctgagcaaagacgacatcattgatgttatgaaaaagctcatcgatatccgtaacggtaaaggcgaagtcgatgatatcgaccacctcggcaaccgtcgtatccgttccgttggcgaaatggcggaaaaccagttccgcgttggcctggtacgtgtagagcgtgcggtgaaagagcgtctgtctctgggcgatctggataccctgatgccacaggatatgatcaacgccaagccgatttccgcagcagtgaaagagttcttcggttccagccagctgtctcagtttatggaccagaacaacccgctgtctgagattacgcacaaacgtcgtatctccgcactcggcccaggcggtctgacccgtgaacgtgcaggcttcgaagttcgagacgtacacccgactcactacggtcgcgtatgtccaatcgaaacccctgaaggtccgaacatcggtctgatcaactctctgtccgtgtacgcacagactaacgaatacggcttccttgagactccgtatcgtaaagtgaccgacggtgttgtaactgacgaaattcactacctgtctgctatcgaagaaggcaactacgttatcgcccaggcgaactccaacttggatgaagaaggccacttcgtagaagacctggtaacttgccgtagcaaaggcgaatccagcttgttcagccgcgaccaggttgactacatggacgtatccacccagcaggtggtatccgtcggtgcgtccctgatcccgttcctggaacacgatgacgccaaccgtgcattgatgggtgcgaacatgcaacgtcaggccgttccgactctgcgcgctgataagccgctggttggtactggtatggaacgtgctgttgccgttgactccggtgtaactgcggtagctaaacgtggtggtgtcgttcagtacgtggatgcttcccgtatcgttatcaaagttaacgaagacgagatgtatccgggtgaagcaggtatcgacatctacaacctgaccaaatacacccgttctaaccagaacacctgtatcaaccagatgccgtgtgtgtctctgggtgaaccggttgaacgtggcgacgtgctggcagacggtccgtccaccgacctcggtgaactggcgcttggtcagaacatgcgcgtagcgttcatgccgtggaatggttacaacttcgaagactccatcctcgtatccgagcgtgttgttcaggaagaccgtttcaccaccatccacattcaggaactggcgtgtgtgtcccgtgacaccaagctgggtccggaagagatcaccgctgacatcccgaacgtgggtgaagctgcgctctccaaactggatgaatccggtatcgtttacattggtgcggaagtgaccggtggcgacattctggttggtaaggtaacgccgaaaggtgaaactcagctgaccccagaagaaaaactgctgcgtgcgatcttcggtgagaaagcctctgacgttaaagactcttctctgcgcgtaccaaacggtgtatccggtacggttatcgacgttcaggtctttactcgcgatggcgtagaaaaagacaaacgtgcgctggaaatcgaagaaatgcagctcaaacaggcgaagaaagacctgtctgaagaactgcagatcctcgaagcgggtctgttcagccgtatccgtgctgtgctggtagccggtggcgttgaagctgagaagctcgacaaactgccgcgcgatcgctggctggagctgggcctgacagacgaagagaaacaaaatcagctggaacagctggctgagcagtatgacgaactgaaacacgagttcgagaagaaactcgaagcgaaacgccgcaaaatcacccagggcgacgatctggcaccgggcgtgctgaagattgttaaggtatatctggcggttaaacgccgtatccagcctggtgacaagatggcaggtcgtcacggtaacaagggtgtaatttctaagatcaacccgatcgaagatatgccttacgatgaaaacggtacgccggtagacatcgtactgaacccgctgggcgtaccgtctcgtatgaacatcggtcagatcctcgaaacccacctgggtatggctgcgaaaggtatcggcgacaagatcaacgccatgctgaaacagcagcaagaagtcgcgaaactgcgcgaattcatccagcgtgcgtacgatctgggcgctgacgttcgtcagaaagttgacctgagtaccttcagcgatgaagaagttatgcgtctggctgaaaacctgcgcaaaggtatgccaatcgcaacgccggtgttcgacggtgcgaaagaagcagaaattaaagagctgctgaaacttggcgacctgccgacttccggtcagatccgcctgtacgatggtcgcactggtgaacagttcgagcgtccggtaaccgttggttacatgtacatgctgaaactgaaccacctggtcgacgacaagatgcacgcgcgttccaccggttcttacagcctggttactcagcagccgctgggtggtaaggcacagttcggtggtcagcgtttcggggagatggaagtgtgggcgctggaagcatacggcgcagcatacaccctgcaggaaatgctcaccgttaagtctgatgacgtgaacggtcgtaccaagatgtataaaaacatcgtggacggcaaccatcagatggagccgggcatgccagaatccttcaacgtattgttgaaagagattcgtagcctgggtatcaacatcgaactggaagacgagtaattctcgctcaaacaggtcactgctgtcgggttaaaacccggcagcggattgtgctaactccgacgggagcaaatccgtgaaagatttattaaagtttctgaaagcgcagactaaaaccgaagagtttgatgcgatcaaaattgctctggctagcccagacatgatccgtagttggtctttcggtgaagttaaaaagccggaaaccatcaactaccgtacgttcaaaccagaacgtgacggccttttctgcgcccgtatctttgggccggtaaaagattacgagtgcctgtgcggtaagtacaagcgcctgaaacaccgtggcgtcatctgtgagaagtgcggcgttgaagtgacccagactaaagtacgccgtgagcgtatgggccacatcgaactggcttccccgactgcgcacatctggttcctgaaaagcctgccgtcccgtatcggtctgctgctcgatatgccgctgcgcgatatcgaacgcgtactgtactttgaatcctatgtggttatcgaaggcggtatgaccaacctggaacgtcagcagatcctgactgaagagcagtatctggacgcgctggaagagttcggtgacgaattcgacgcgaagatgggggcggaagcaatccaggctctgctgaagagcatggatctggagcaagagtgcgaacagctgcgtgaagagctgaacgaaaccaactccgaaaccaagcgtaaaaagctgaccaagcgtatcaaactgctggaagcgttcgttcagtctggtaacaaaccagagtggatgatcctgaccgttctgccggtactgccgccagatctgcgtccgctggttccgctggatggtggtcgtttcgcgacttctgacctgaacgatctgtatcgtcgcgtcattaaccgtaacaaccgtctgaaacgtctgctggatctggctgcgccggacatcatcgtacgtaacgaaaaacgtatgctgcaggaagcggtagacgccctgctggataacggtcgtcgcggtcgtgcgatcaccggttctaacaagcgtcctctgaaatctttggccgacatgatcaaaggtaaacagggtcgtttccgtcagaacctgctcggtaagcgtgttgactactccggtcgttctgtaatcaccgtaggtccatacctgcgtctgcatcagtgcggtctgccgaagaaaatggcactggagctgttcaaaccgttcatctacggcaagctggaactgcgtggtcttgctaccaccattaaagctgcgaagaaaatggttgagcgcgaagaagctgtcgtttgggatatcctggacgaagttatccgcgaacacccggtactgctgaaccgtgcaccgactctgcaccgtctgggtatccaggcatttgaaccggtactgatcgaaggtaaagctatccagctgcacccgctggtttgtgcggcatataacgccgacttcgatggtgaccagatggctgttcacgtaccgctgacgctggaagcccagctggaagcgcgtgcgctgatgatgtctaccaacaacatcctgtccccggcgaacggcgaaccaatcatcgttccgtctcaggacgttgtactgggtctgtactacatgacccgtgactgtgttaacgccaaaggcgaaggcatggtgctgactggcccgaaagaagcagaacgtctgtatcgctctggtctggcttctctgcatgcgcgcgttaaagtgcgtatcaccgagtatgaaaaagatgctaacggtgaattagtagcgaaaaccagcctgaaagacacgactgttggccgtgccattctgtggatgattgtaccgaaaggtctgccttactccatcgtcaaccaggcgctgggtaaaaaagcaatctccaaaatgctgaacacctgctaccgcattctcggtctgaaaccgaccgttatttttgcggaccagatcatgtacaccggcttcgcctatgcagcgcgttctggtgcatctgttggtatcgatgacatggtcatcccggagaagaaacacgaaatcatctccgaggcagaagcagaagttgctgaaattcaggagcagttccagtctggtctggtaactgcgggcgaacgctacaacaaagttatcgatatctgggctgcggcgaacgatcgtgtatccaaagcgatgatggataacctgcaaactgaaaccgtgattaaccgtgacggtcaggaagagaagcaggtttccttcaacagcatctacatgatggccgactccggtgcgcgtggttctgcggcacagattcgtcagcttgctggtatgcgtggtctgatggcgaagccggatggctccatcatcgaaacgccaatcaccgcgaacttccgtgaaggtctgaacgtactccagtacttcatctccacccacggtgctcgtaaaggtctggcggataccgcactgaaaactgcgaactccggttacctgactcgtcgtctggttgacgtggcgcaggacctggtggttaccgaagacgattgtggtacccatgaaggtatcatgatgactccggttatcgagggtggtgacgttaaagagccgctgcgcgatcgcgtactgggtcgtgtaactgctgaagacgttctgaagccgggtactgctgatatcctcgttccgcgcaacacgctgctgcacgaacagtggtgtgacctgctggaagagaactctgtcgacgcggttaaagtacgttctgttgtatcttgtgacaccgactttggtgtatgtgcgcactgctacggtcgtgacctggcgcgtggccacatcatcaacaagggtgaagcaatcggtgttatcgcggcacagtccatcggtgaaccgggtacacagctgaccatgcgtacgttccacatcggtggtgcggcatctcgtgcggctgctgaatccagcatccaagtgaaaaacaaaggtagcatcaagctcagcaacgtgaagagcgttgtgaactccagcggtaaactggttatcacttcccgtaatactgaactgaaactgatcgacgaattcggtcgtactaaagaaagctacaaagtaccttacggtgcggtactggcgaaaggcgatggcgaacaggttgctggcggcgaaaccgttgcaaactgggacccgcacaccatgccggttatcaccgaagtaagcggttttgtacgctttactgacatgatcgacggccagaccattacgcgtcagaccgacgaactgaccggtctgtctagcctggtggttctggattccgcagaacgtaccgcaggtggtaaagatctgcgtccggcactgaaaatcgttgatgctcagggtaacgacgttctgatcccaggtaccgatatgccagcgcagtacttcctgccgggtaaagcgattgttcagctggaagatggcgtacagatcagctctggtgacaccctggcgcgtattccgcaggaatccggcggtaccaaggacatcaccggtggtctgccgcgcgttgcggacctgttcgaagcacgtcgtccgaaagagccggcaatcctggctgaaatcagcggtatcgtttccttcggtaaagaaaccaaaggtaaacgtcgtctggttatcaccccggtagacggtagcgatccgtacgaagagatgattccgaaatggcgtcagctcaacgtgttcgaaggtgaacgtgtagaacgtggtgacgtaatttccgacggtccggaagcgccgcacgacattctgcgtctgcgtggtgttcatgctgttactcgttacatcgttaacgaagtacaggacgtataccgtctgcagggcgttaagattaacgataaacacatcgaagttatcgttcgtcagatgctgcgtaaagctaccatcgttaacgcgggtagctccgacttcctggaaggcgaacaggttgaatactctcgcgtcaagatcgcaaaccgcgaactggaagcgaacggcaaagtgggtgcaacttactcccgcgatctgctgggtatcaccaaagcgtctctggcaaccgagtccttcatctccgcggcaagcttccaggagaccactcgcgtgctgaccgaagcagccgttgcgggcaaacgcgacgaactgcgcggcctgaaagagaacgttatcgtgggtcgtctgatcccggcaggtaccggttacgcgtaccaccaggatcgtatgcgtcgccgtgctgcgggtgaagctccggctgcaccgcaggtgactgcagaagacgcatctgccagcctggcagaactgctgaacgcaggtctgggcggttctgataacgagtaatcgttaatccgcaaataacgtaaaaacccgcttcggcgggtttttttatggggggagtttagggaaagagcatttgtcagaatatttaaggaatttctgaatactcataatcaatgtagagatgactaatatcctgaaactgactgaactaattgagtcaaactcggcaaggattcgatactattcctgtgtaactttcttaaggaacgagaatgaaacaggaagtggaaaagtggcgaccttttggacatccggatggtgatattcgtgatttaagttttcttgatgctcatcaggctgtctacgttcagcatcatgagggcaaagagcctttagagtatcgcttttgggttacctactctcttcactgcttcacaaaagattatgaacatcagacgaacgaagaaaaacaaagcttaatgtaccacgcgcctaaagaatctcgtcccttctgccagcaccgttataacttagcgcgcacacacttaaaaagaactattttggcgctgccagaaagcaacgttattcatgccgggtatggtagctatgccgtgattgaggtggacttagacggaggagataaggcattttactttgttgcgttcagggctttcagggaaaagaaaaaactccgtttgcatgtaactagcgcttatcccatttctgaaaaacagaaaggtaaaagtgtgaaatttttcaccattgcctacaacttattgagaaataagcagcttcctcagcccagtaaataacaaaacccaccttaaggtgggtttcgccagagaattatctctggtattcagaacgccattaccggactttgccttgaccttgcgataatcgcaggttgcgggatgtctgaatttcttcagtctgctgcatcctggaagatgagaacatgtgttcttattttcgtctctatcatagttgagtatttactctcttacaatcagatctctttcattgctcaacaggcgatggcttcagactttgcattacggaatttttaagaaaggcagggcgaaacgaggaagaagcttttcgccctggacaacattcctgctgacggcactaccataaaaaaacacaacgctttcaacaaccttgcgtttttcatcttccgtagcggctcggaataaatttacgttcttacattccgtctcatagtctttggctggcgcgtcccagatagctgtcccagtctttccataccggctgcaaaccctgagcggttaacgcggcagcaaccgcttccggtctgcgatcgtcgtgcggactgaactgttccaactcggggtgattatcggcatagccacctggctgcgttttgctgaaggcgctgacgttattgatcgccagcggaataacgcgatcgcgaaaccacggactttcccgcgtggagagactcagttcaatctccggtgcaagcagtcggaaggcgcagatggtttgcactaactggcgttcatccataatgctcgcaggctcaatgccgccagtacacgggcgcaggcgcggaaaggagacagagtaacggctttgccagtaatgctgttgcagccatagcaaatgttcggcaaccatatagctgtcaacgcgccagttgtcggaaaggccaattagcgcgccgaggcctatcttatcaatccccgcacgccccagccgatccggcgtttccagccgccagaagaagtcctgttttttgcctttcagatgatggcgggcataagtcgcctcgtgatatgtctcctgataaaccatcacgccatccagaccaagttgctttaactcggcgtattccgtctccgccagcggttgcacttccatctgtagactagagaactgttcacgaagggcagggagatgacgacgaaagtaatccatccccactttcgcctgatgttcaccagtgactaacagcagatgttcaaagcccatctcccgtatagcggcactttccctggcaatatccgcttcatccagcgttttgcgcttgatgcgattactcatggaaaatccacagtacgtgcagtcgttagcgcaaagattggaaagataaagcgggacgtagaaactaactgtgttgccaaatcgctgacgggtcagacgctgcgcccgttgggccagttgttccagatagccactggcggcagggcttaacagcgccatcatgtcgtcgcgggtgagttggctggcatttagcgcccgctctacgtcagcagccgttttgccgttgatacgcaggcggatgtcgtcccagtccagttgtcgccagcgatcgctgaaggttttcatgcgcttgcctccagaaatccggtcagcgggctggtggcatgagcaaaataactgcggctgcccggtccggactgacgtgccagtaggcctgcttctaccgccagacgaaatgccttcgccatgttgacgggatcgtccgcgacggcaatcgccgtattcactaacaccgcgtcggcccccatttccagcgcctgcgcggcatggctgggaacgccgatgccagcatcgacaaccaccggcactgtggcctgctggataataatctccagcatggcgcgggtttccagtccctgattgctgccaatcggcgcgccgagcggcatcaccgctgcacagccgacttcttccagacgtttacacaataccggatcggccccgcagtaaggcagcacgacaaatccctgttgtaccagcgtttcggcggctttcagggtttcgatgggatcgggcaacagccagcgggcgtcagggtgaatctctaattttaaccagtttgtgcctaacgcttcacgagccagatgggcggcgaaaatggcttcttccgctgttttcgccccggatgtatttggcagcagggtcacacccgccgcgataagcggttcgaggatagcgtcgttgtgctggcgcaagtcgacacgtttcatcgccagtgtcaccagctggctgccggaagcgcggatcgcctccaccatcagttgactagaagcgaatttccctgtgccggtaaacagatgactatcaaacgttttgtccgcaatacgtaacatttcaaccccctgcaataacctgaaaaagcaggatctggtcgccatcctgcacgatatgttgcgcccactgctcacgcgggacgatttgctgattaatcgccagagccgcgcccgcttgtcgttggtcgagttgctccagtagttcgtgaacagtttgcccggcggcgcactgcatcgcttgatcgttaaacaggatctgcattgcttcctccgcataccgggcaaccactggcgcggcgcaacgccaggctgcgccactggctgcttttaccgtcgaacagtcggagttctcccgcaggtgtctctataccgcttaataacttaatggcttccagtgcctgcaaagtgcccataaccccgaccaccgggccaaccacgcccgccgtgcggcagttgcgttctggctcctggttatctggccacaggcagcggtaacacccctgctcccagggcggcgtcagtaccatcaactgaccgccaaatccgaccgcgctggcggtgataagcggcgtgttgagtgccacgcaggcggcattaatctcctggcgagtcgccatattgtcggtacagtcgagcaccacatcggcccgtgcaaccgcatcttttaacgcctcacccgttaaccgttgttgtaatgctgtcagttgaatgtcgggattcaactgtgtcagtcgctgttggctgacctggcttttcgggcgatcgatatcttcagtggtaaagaggatttgtcgttgcagattgcttaaatgcacatcgtcgtcatctgccagtaccagcgtcccgacgccagcgcccgccaggtacagcgcagcaggtgtacccagcccgcccagaccgataatcagcacctggctgtcgagcagtttttgctgcccgtccagagcgatatcgtcgagcaggatttggcggctataacgcataaagtcacggtcattcatcgccaactcctgcaatttccagcaactgtgccgttgccaaacgccagtctgcggcttgagtaatggcgctgacgacggcgatactgccgacacccgttgctatcaccgcaggcgcgcgtgccagactgataccgccaatcgccacggtgggataatccgccagtcgctcaacatgccgtgccagctgttccagcccctgcggtgcagaaggcatctgtttggtttgcgtcgggaacacatgtcccagcgcgatataagaggggcgtgctgccagcgcgacgtcgatttccatatcgtcatgtgtgctaacgcccagccgcaggcctgccgcgcggatggcattgagatcggtggcttgcaaatcttcctgccccaaatggacgccatacgcctgatgcttgatcgccagccgccagtaatcgttgataaacaatcgcgcgttatagcggcggcccagcgcaattgccgccacgacatcggcttccacctcttcatcgcgccgatctttgatgcgtagctggagagtacgtacgcctgcatccaacagacgttcgatccactgtacgctgtccaccaccgggtacagtccactacgaaaaggtacaggaggaaaatcaggctgatacatcacgcttcctccttacgcaggtagatttctccgcctctggcacggaagttctcgctcatatccgccattcccatttcaatagtttgcgtggcggcgtaatcacgcacttcctggctgattttcatgctgcagaatttcggcccacacatggagcaaaaatgggcgactttaccactctcttgcggcagggtttcatcgtgataagcgcgggcggtaaacgggtcgagggccagattaaactggtcttcccagcgaaattcgaagcgggctttgctcatggcgttatcgcgaatttgcgcgcccggatgccctttcgccaggtcagcggcgtgggcagcaatcttataggtgataagcccctgcttaacatcttctttattgggcagacccagatgctcttttggcgttacgtaacagagcatcgcgcagccaaaccagccaatcatcgccgcaccaatcccgctcgtgaagtggtcatagcccggcgcaatatcggtagttagcggccccagagtgtaaaacggcgcttcgtggcagtgctctaactcctcggtcatattgcggcggatcatctgcatcggcacgtggcctgggccttcaatcatcacctgcacgtcatattcccaggcaattttggtcagttcgcccagcgtatgcagctcggcaaactgcgcttcatcgttggcgtcctgaatagaaccggggcgcagaccgtcgcccaggctcaggctaacgtcataagcggcacagatttcacaaatttcgcggaagtgttgatagaggaaattttcctgatgatgggagaggcaccatttcgccataatgctaccgccgcgagagacgataccggtcaggcgtttcgcggtcatcggcacatagcgcagcagtacgcccgcatggatagtgaagtaatccacaccttgctcggcctgttccagcagcgtgtcgcggaacgcttcccaggtaagatcttcggcgatcccgttaaccttctccagcgcctggtagatcggcactgtaccgatcggcaccgggctgttacgcaaaatccactcgcgggtttcgtgaatatagcgaccggtggagagatccatcaccgtatccgctccccagcgcgtggaccataccagcttttccacttcttcttcgatggaagaggtgaccgcgctgttgccgatattggcgttaacttttaccaggaaattgcgaccaataatcatcggctcgctttccggatgattaatgttggccgggataatcgcacgtccggcagcaacttcatcacggacaaattccgcagtgatattttccggcagatgtgcgccaaagctcattcccggatgctggtggcgtaaaacctcgctacggatgcgctcgcggcccatattctcgcggatggcgatgaattccatttccggcgtgatgatgccctggcgggcgtagtgcagttgggtgacacggcgtcctgctttggcgcgttttggtgttagtacgccgctaaaacgcagttcgtcgaggccatcatctgccagccgcgctttagtgtaatcggaactgcgcacggtaagttcttcggtatcgccgcgcgcatcgatccacggctggcgtagttttgccagcccttgctgcacgttaatggcaatctgcggatcaccatacgggccggaggtgtcgtagaccggaatcgcttcgttttcttcgtactgcggctgttctttgctaccgccaattagcgtcgggctaagctggatctcacgcatcggcacgcgcacgccggggtgtgtgccagtgatataaatgcgtttactgttgggaaaggcggtgccttccagggtgtcgataaaatgttgggcccgggcgcgttgttcgcggcgggtcagttttgttgcagacatagctcattccaaaaagttaaggacgtggcttgtcagacgacggatgaagcaagagacgatcgccgcaggggcgatgcgatagcagattaactcttgttcccttcgcaggtattagcctgatcaggttccgcggatcccgaataaacggtctcagccagttaaggcactccgacaagaaattagccccgcaaatggggcattgaatgtaaattacgcgttaacagcgcagaactcaagcaggatgtttgacgcgggcggcgtcaagcaccagcagaatcagcttatcttccagcacaaagcgcgcttccagcgcctcgccgatgtcagataaaacctgttgaaactcaaggtaattatcatgatcgatggcggtttccagactggaatcgtagtaatccataatctgttgagtattggcttcgagttgcggccaaatcttcgcggcgcgcgcgagttgcccgttgccttccagcttatgaagaatgcgctcataaatactgaaatgtccggcagacaagtaatcgaccaggctctgacaaaaatcatcaagggctttttcgtttagcctcatgtagctttctttgccaggcttaatgccaaccagattgtagtaagccacgagcagatgcttacgtacatgtagccagcgatcaaccagtttgttacttcctctgacgcgctccgtcaggttatcgagctggttaagcatgattgactccgcaagtttgtattcaaaaactgctcagtgagaaatgtaaaaaccatgttaaacatgccagtgatgcaaaggtagtgcaagagctatggatcgtataattgaaaaattagatcacggctggtgggtcgtcagccatgaacaaaaattatggttgccgaagggagaattgccatatggcgaagcggcaaatttcgatcttgtgggtcagcgcgcactacaaatcggcgaatggcagggggaacctgtttggttagtacaacagcagcggcgtcacgatatggggagcgtacgtcaggtcattgatctcgatgttgggctgtttcaactggccggacgaggcgtacaactggcggagttttaccgaagccataaatactgtggttactgcgggcatgaaatgtatccgagcaaaaccgaatgggcgatgctgtgcagccattgccgtgagcgttactacccgcaaatcgccccctgcattattgttgccatccgtcgcgatgatagcatcctcctcgcccagcatacccgccatcgtaacggtgtccatacagtacttgccggattcgtcgaagtgggcgaaaccctcgagcaggcagtcgcgcgggaagtgatggaagagagcggaattaaagttaaaaacttgcgttacgtgacttctcagccgtggccgtttcctcagtctttaatgaccgcgtttatggcggaatatgacagcggcgacatcgtgatcgacccgaaagaattgctcgaggcgaactggtatcgctatgacgatttgccgttactcccgccgcccggcaccgtagcgcgccgtctgatagaagatacggtggcgatgtgtcgggcagagtatgagtgatgatacactgaccgcctgacgcactaaggaacagccaaaatgaccgaacttaaaaacgatcgttatctgcgggcgctgctgcgccagcccgttgatgtcactccagtatggatgatgcgccaggcgggtcgctatctaccggaatataaagccacgcgcgcccaggcaggcgattttatgagcctgtgcaaaaacgccgagctggcgtgcgaagtgactttgcaaccgctgcgtcgctacccgctggatgcggcgatcctcttttccgatatcctcaccgtgccggacgcgatggggttagggctctattttgaagccggagaaggtccgcgttttaccagcccagtcacctgcaaagctgacgtcgataaactgccaattccggacccggaagatgaactgggttacgtgatgaacgcggtgcgtaccattcgtcgcgaactgaaaggcgaagtgccgctgattggtttttccggcagcccgtggacgctggcgacctacatggtggaaggcggcagcagcaaagccttcaccgtgatcaaaaaaatgatgtatgccgatccgcaggcgctgcacgctctgctcgataaactggcgaaaagcgtcactttgtatctgaatgcgcagattaaagccggtgctcaggcagtgatgattttcgacacctggggcggcgtgcttaccgggcgcgattatcaacagttcagcctctattacatgcataaaattgttgatggtttactgcgtgaaaacgacggtcgccgcgtaccggtcacgctgtttaccaaaggcggcggacagtggctggaagccatggcagaaaccggttgcgatgcgctgggcctcgactggacaacggacatcgccgatgcgcgccgccgtgtgggcaataaagtcgcgttgcagggtaatatggatccgagcatgctgtacgcgccgcctgcccgcattgaagaagaagtagcgactatacttgcaggtttcggtcacggcgaaggtcatgtctttaaccttggtcacggcattcatcaggatgtgccgccagaacatgctggcgtgttcgtggaggcagtgcatcgactgtctgaacagtatcaccgctaaggagtgattatggatctcgcgagtttacgcgctcaacaaatcgaactggcttcttctgtgatccgcgaggatcgactcgataaagatccaccggatctgatcgccggagccgatgtcgggtttgagcagggcggagaagtgacgcgagcggcgatggtgctgctgaaatatcccagccttgagctggtcgagtataaagttgcccgcatcgccaccaccatgccttacattccaggttttctttccttccgcgaatatcctgcgctgctggcagcgtgggagatgctgagccaaaagccggatttagtgtttgtcgatggtcatgggatcagccatcctcgccgtcttggcgtcgccagccattttggcttattggtggatgtgccgaccattggcgtggcgaaaaaacggctctgcggtaaattcgaaccgctctccagcgaaccgggcgcgctggccccactgatggataaaggcgagcagctggcctgggtctggcgcagcaaagcgcgctgtaacccgttgtttatcgctaccggccatcgggtcagcgtggacagcgcgctggcgtgggtacaacgctgcatgaaaggctatcgtctgccggagccaacgcgctgggcggacgcggtggccagcgaacgtccggcgttcgtgcgctatacagcaaatcagccctaattcaggtaaactgcggataatttccgtatttgagaactcaacatgttacaaaacccaattcatctgcgtctggagcgcctggaaagctggcagcatgtcactttcatggcttgcttatgcgaacgcatgtaccccaattacgccatgttctgccagcaaaccggttttggtgatgggcaaatttaccgtcgcattctcgatctcatctgggaaacgctgaccgttaaagacgcaaaagtaaatttcgacagccaactggagaaatttgaagaagcgattcctagtgccgacgatttcgatctgtacggcgtttatccggcaatcgatgcctgcgtggcgttaagtgaactggtccatagccgtttgagtggtgaaacgctcgaacacgcggtggaagtgagtaagacctccatcacgaccgttgcgatgctggaaatgactcaggctggtcgcgaaatgagcgatgaagagcttaaagaaaacccagctgtagagcaagaatgggacattcagtgggaaatattccgacttttagctgagtgcgaagaacgcgatatcgagctgataaaaggccttagggcagacctgcgtgaggcgggtgagagcaatattggtataatttttcagcaataagaccagaaaacgtgatttaacgcctgatttgtcgtacctggagtcttccctttcgccccccgtctggtctacatttggggggcgaaaaaaagtggctatcggtgcgtgtatgcaggagagtgctattctggcatttccgtcgcactcgatgcttagcaagcgataaacacattgtaaggataacttatgaacaagactcaactgattgatgtaattgcagagaaagcagaactgtccaaaacccaggctaaagctgctctggagtccactctggctgcaattactgagtctctgaaagaaggcgatgctgtacaactggttggtttcggtaccttcaaagtgaaccaccgcgctgagcgtactggccgcaacccgcagaccggtaaagaaatcaaaattgccgcagctaacgtaccggcatttgtttctggcaaggcactgaaagacgcagttaagtaagattgcgtggcagtgaacagttttaacgaaggggtggttagtccccttttgtctttctggcgtcgaagtttgatgctggctggcgctctgcttctcactgcctgtagtcataactctagtcttcctccctttaccgccagtggatttgctgaagaccagggcgcggtacgcatctggcgaaaagacagcggcgataatgtgcatctgcttgccgtgtttagcccgtggcgcagtggcgataccacgacgcgagagtatcgctggcagggcgataacctcacgctcatcaatatcaatgtttacagcaaaccgccggtgaatattcgcgcgcgttttgacgatcgcggtgatctgagctttatgcaacgtgaatccgatggggaaaagcagcagctttctaacgaccaaatcgatttataccgttatcgtgctgatcagatccgccagattagcgatgccttacgtcaggggagagtcgtgctgcgccaggggcgctggcatgcgatggaacagaccgtgaccacctgcgaagggcaaaccattaaacctgatttagatagccaggcgatagcgcatatcgagcgccgccagagccgctcttctgttgatgtcagcgtggcatggctggaagcgcccgaaggtagccaattactgttagtggcaaactctgatttctgtcgctggcaacccaacgagaaaacgttctgatttaccagtggcccatacccatatgaccgccaccaccgcagccgccgtagcccatgcccattccggctccgcgcggaatacccgcttcagccatcgcgatatctcgtttcacccgtaactcatctaagctctgacgcaaattctccatctctttggcgaccgcgttaattttgctgctatccggtgggttcgcggctaacagggcattgtattcataacgcttcgtcaccagttgctgttgcagtgcgctgctttgagcgtaaaagtcattatggattttctgccacgctgtctgttgttcgctggtcaaaggcgcggcattttgctgccacataccgtgtccgccgtgagcaaatgcagatgtgcttcccatcgccattgcactaagcgccatcattaccagggcaattttcgtgttccgtttcatggttaatcctccagtggttgtcttacttcgggtattgcatcttccgtgccaacgatgaaacgctgatatgacgggtaatctggcatgataaacgagtaaaaatgactcgcctgctgcgggtagcgagtcatttttactcattgaaacttaagcctttgtgttacagcgcagggtaagcgctgataaaagatggcatgatttctgctgtcagaaagggatgagcaggcaaagaagaagatgcgttttatgcaacgttctaaagactccttagctaaatggttaagcgcgatcctccccgtggtcattgttgggctggtgggattgtttgcggtaactgtgattcgtgattatgggcgggcaagcgaggcagaccgccaggcattactggaaaaaggtaatgtgcttatccgcgctctggagagcggaagccgcgtagggatggggatgcgaatgcaccatgtacagcaacaggcgcttctggaagagatggcgggacagccgggagtgttgtggttcgcagtcaccgatgcgcagggcatcattattcttcatagcgaccccgataaggtcgggcgtgcgctctatagcccggatgaaatgcagaaattaaagccagaggaaaactcccgctggcggctgcttgggaaaacggaaactacgcctgcacttgaggtctatcgtttgttccagccaatgagtgcgccctggcggcatggaatgcacaatatgccgcgctgtaacggcaaagctgtgccacaagtagatgcacaacaggctatttttatcgccgttgatgccagtgatctggttgcaacccagagtggggaaaagcgcaataccctgattatcctcttcgccctggcgacggtcttgctggcaagcgtattgagtttcttctggtatcgccgctatctgcgcagccgccagcttctacaagatgaaatgaagcgcaaagagaagctggtggcgctggggcatcttgcggcaggcgttgcccacgaaatccgtaacccactttccagcattaaaggactggcgaaatactttgccgagcgcgcgcctgcagggggagaagcgcatcaactggcgcaggtgatggcgaaagaggccgaccgtttaaaccgcgtggtaagcgagttgctggaactggttaagccaacgcatctggctttgcaggcggtggatctcaacacgctgattaaccacagtttacagctggtaagtcaggatgcaaacagccgggagatccagttacgctttaccgccaacgacacattaccggaaattcaggccgacccggacaggctgactcaggtcctgttgaatctctatctcaatgctattcaggcgattggtcagcatggcgtgattagcgtgacggccagcgaaagcggcgcgggcgtgaaaatcagcgttaccgacagcggtaagggaattgcggcagatcagcttgatgccatcttcactccgtacttcaccactaaagccgaaggcaccggattggggctggcggtcgtgcataatattgttgaacaacacggtggtacaattcaggtcgcaagccaggagggaaaaggcagtacgttcaccctctggcttccggtcaatattacgcgtaaggacccacaaggatgacgcacgataatatcgatattctggtggtggatgatgacattagccactgcactattttgcaggctttactgcgcggctggggctataacgtcgcgctggcgaacagcgggcgacaggcgttggagcaggtgcgggaacaggtttttgatcttgtgctttgcgatgtgcgaatggcggagatggacggcatcgccacgctgaaagagatcaaagcgttaaacccggcaattccggtgctgattatgactgcgtactccagcgtcgagacggcggtagaggcactgaaaactggggcgctggattatctcatcaagccgctggatttcgataacctacaggcgacgctggaaaaagcgctcgcgcatacgcacagtattgatgctgaaacacctgcggtgactgccagccagttcggtatggtcggtaaaagcccggcgatgcaacacctgctcagtgaaatcgccctcgtcgcgccaagcgaagccacggtactgatccacggcgattccggcaccggtaaagagctggtcgccagggcgattcacgccagtagcgcacgtagcgaaaaaccgctggtaacgctcaactgtgcggcactcaacgaatccttgctggaatctgaattgttcggtcacgaaaaaggggcgtttactggagccgataaacgccgggaagggcgctttgttgaggcggacggcggcacgctgtttctcgatgaaattggcgatatcagcccgatgatgcaggtgcgtctgctgcgtgcgattcaggagcgcgaagttcagcgtgtcggtagcaaccagattatcagcgttgatgtccggctgattgcggcgacccatcgcgatcttgccgcagaggtgaatgccgggcgttttcgccaggatctctactatcgcctgaatgtggtggcgattgaagtaccaagcctgcggcaacggcgggaagatatccctctgctggctggccattttctgcagcgctttgccgagcgtaatcgcaaggcggtaaaaggttttacgccccaggcgatggatctgttgattcattacgactggccgggaaatattcgtgagctggaaaacgcggtggaacgggcagtggtgctgctgaccggggaatatatttccgaacgcgagctgccgctggcgattgccagtacgccgatcccgctgggacaaagtcaggatattcagccgttggtggaagtggaaaaagaggtgattctggcggcgctggagaaaacgggcggcaacaaaaccgaagccgcccgtcagttagggatcacgcgcaaaacgctattggcaaaactgagccgttaattctgctcgcgttcgatagcgcgccagccgatatctttccggcagaagcagtcgtcccagtggatatcggtcattaaggcataggcgcgtttctgcgcttctgccacggtatgacccagcgcggtgacgcacagtacgcgcccgccgttggtcactacctgctcgtcatccgccagttttgtgcccgcgtggaacactttgccgcctgccacttcttccagcggcaggccgtggatcacgtcaccggtgcggtaatcacccggatatccacccgcagccatcaccacgccgagagaagcgcgttcatcccactcggacgttttctcgtccagtttgctttcacaggccgccaggcagagctcaaccagatcggacttcatgcgcagcataatcggctgggtttccggatcgccaaagcggcagttaaattcaataaccttcggattgccctgtttgtcgatcatcaggcccgcgtagagaaaaccggtgtaggtgttgccttccgccgccatgcctttcacggttggccagataatacgttccatggtgcgctgatgaacgtcatcggttactaccggcgcgggggagtaagcgcccatcccgccggtgtttggtccggtatctttatcgcctacgcgtttgtgatcctggctggtagccatcggcagcacatgctcgccgtccaccatcacgataaagctcgcttcttcgccatcgaggaactcttcgataacgatgcgatgacccgcgtcgccaaaagcgttgcccgccagcatatcgtgaacagccgcttccgcttcttccagcgtcatcgccacgataacgcctttcccggcagccagaccgtccgctttaatgacgattggcgcgcctttctcacgcagatacgccagcgcaggttctacctcggtgaagttctggtattccgccgtagggatcttatggcgggccaggaaatctttggtaaacgctttactgccttccagttgggccgcacctgcggttgggccgaagattttcagcccggcggcgcggaaggtatcgaccacgcctttcaccagcggcgcttccgggccgacgatggtcagatcaatcttttcgttttgtgcgaaatccaacagcgccgggatatcggtcacgccaatagcaacgttttgcagcgcgggttccagtgcagtgcctgcattacccggagcaacaaaaacagtctcaaccagcgggctctgggccgctttccaggccagcgcgtgctcgcgcccgccgttaccaatcactaatactttcatctattgctccattaatggcggaagtggcgcatgtcggtgaagagcatcgcaataccgtgctcgtcggcggcggcaatcacttcgtcatcacggatagaaccgccaggctggattacgcaggtcacgcccgcagcggcggcggcatcaataccgtcgcggaacgggaagaacgcgtcagaagccatgctggaacctttcacttccaggccttcatcggccgctttaataccggcgatttttgcggagtacacgcggctcatctggcccgcgccaatgccgatagtcatattgtttttggcatagacgatagcgttggatttcacaaacttcgccaccttccagcagaacagcgcatcacgcagttcctgttcgctcggctgacgtttggtcaccacgcgcagttcttccgcaccgaccatccccaggtcacgatcctgaaccagcagaccgccgttcacgcgtttgaaatcgaggcccggaacacgctcgccccactgaccgcaggtcagaacgcgtacgttctgtttggcggcggtgattttcagggcttcttcgctggcggacggcgcaataatcacttcgacaaactgacgagaaatgatggcctgtgcggtttccgcatccagctcgcggttaaaggcaatgatgccgccgaatgcggaggttgggtcggttttgtacgcgcgatcgtaagcatcaagaatggaattgccgatagccacgccgcaagggttggcgtgcttcacaatcacacatgccggctcggcgaactctttcacgcactccagcgccgcatcggtatcggcgatgttgttataagagagggctttaccctgaacctgggttgcggtagcaacggaggcttctttcacattctcttctatatagaaggcagcctgctggtggctgttctcgccgtaacgcatatccagcttcttaatgaagttcaggttcagcgtgcgtgggaagcgaccggcggcttctttgctttcaccgtggtaagccggaaccatgctgccgaagtagttggcaatcatgctgtcgtaggcggcagtgtgttcgaaggctttgatggcgaggtcgaaacgggttgcaagcgtcaggcttccttcgttgtcatccatctctttaataatggcgtcatagtcgctgctcttcaccacgattgcgacatctttatggttcttggcggcggagcgcaccatcgttgggccgccgatatcgatgttctcaaccgcatcttccaggctgcaaccttcacgggccacggtctgggcgaacggatacaggttaacaaccaccatatcgataggctggatctgatgttcttccataatggcatcgtcctggccgcgacggcccagaatgccaccatgtactttcggatgcagggtcttcacgcgtccatccatcatctccgggaaaccggtgtaatcggaaacttcggttaccggcagacctttttctgctaacagacgggcagtgccccctgtagacagcagctccacaccgcgtgcggaaagtgcctgggcgaattcgacgataccggctttgtcagaaacactgagcagagcgcggcggactggacgacgttgttgcatggtaaatcccctggatttgactattacagagagcgttagctgaatttttcgcgaaaaactcagctaacgcccctaacggggcatccttatttttcgcccgcattgtaacgaaaacgtttgcgcaacgctcgcgaatttttctctttcaatggtgatcacaattttgactgtggttaccgtgggcaaaatacagaaattacattgatgattgtggataactctgtgcgtaaaaaggtataaagcgggcttttgctggggaatgcagcagtcagtcatttttctgcaatttttctattgcggcctgcggagaactccctataatgcgcctccatcgacacggcggatgtgaatcacttcacacaaacagccggttcggttgaagagaaaaatcctgaaattcagggttgactctgaaagaggaaagcgtaatatacgccacctcgcgacagtgcgctaaagcgcgtcgcaactgctctttaacaatttatcagacaatctgtgtgggcactcgaagatacggattcttaacgtcgcaagacgaaaaatgaataccaagtctcaagagtgaacacgtaattcattacgaagtttaattctttgagcatcaaacttttaaattgaagagtttgatcatggctcagattgaacgctggcggcaggcctaacacatgcaagtcgaacggtaacaggaagaagcttgcttctttgctgacgagtggcggacgggtgagtaatgtctgggaaactgcctgatggagggggataactactggaaacggtagctaataccgcataacgtcgcaagaccaaagagggggaccttcgggcctcttgccatcggatgtgcccagatgggattagctagtaggtggggtaacggctcacctaggcgacgatccctagctggtctgagaggatgaccagccacactggaactgagacacggtccagactcctacgggaggcagcagtggggaatattgcacaatgggcgcaagcctgatgcagccatgccgcgtgtatgaagaaggccttcgggttgtaaagtactttcagcggggaggaagggagtaaagttaatacctttgctcattgacgttacccgcagaagaagcaccggctaactccgtgccagcagccgcggtaatacggagggtgcaagcgttaatcggaattactgggcgtaaagcgcacgcaggcggtttgttaagtcagatgtgaaatccccgggctcaacctgggaactgcatctgatactggcaagcttgagtctcgtagaggggggtagaattccaggtgtagcggtgaaatgcgtagagatctggaggaataccggtggcgaaggcggccccctggacgaagactgacgctcaggtgcgaaagcgtggggagcaaacaggattagataccctggtagtccacgccgtaaacgatgtcgacttggaggttgtgcccttgaggcgtggcttccggagctaacgcgttaagtcgaccgcctggggagtacggccgcaaggttaaaactcaaatgaattgacgggggcccgcacaagcggtggagcatgtggtttaattcgatgcaacgcgaagaaccttacctggtcttgacatccacggaagttttcagagatgagaatgtgccttcgggaaccgtgagacaggtgctgcatggctgtcgtcagctcgtgttgtgaaatgttgggttaagtcccgcaacgagcgcaacccttatcctttgttgccagcggtccggccgggaactcaaaggagactgccagtgataaactggaggaaggtggggatgacgtcaagtcatcatggcccttacgaccagggctacacacgtgctacaatggcgcatacaaagagaagcgacctcgcgagagcaagcggacctcataaagtgcgtcgtagtccggattggagtctgcaactcgactccatgaagtcggaatcgctagtaatcgtggatcagaatgccacggtgaatacgttcccgggccttgtacacaccgcccgtcacaccatgggagtgggttgcaaaagaagtaggtagcttaaccttcgggagggcgcttaccactttgtgattcatgactggggtgaagtcgtaacaaggtaaccgtaggggaacctgcggttggatcacctccttaccttaaagaagcgttctttgcagtgctcacacagattgtctgatagaaagtgaaaagcaaggcgtcttgcgaagcagactgatacgtccccttcgtctagaggcccaggacaccgccctttcacggcggtaacaggggttcgaatcccctaggggacgccacttgctggtttgtgagtgaaagtcacctgccttaatatctcaaaactcatcttcgggtgatgtttgagatatttgctctttaaaaatctggatcaagctgaaaattgaaacactgaacaacgaaagttgttcgtgagtctctcaaattttcgcaacacgatgatgaatcgtaagaaacatcttcgggttgtgaggttaagcgactaagcgtacacggtggatgccctggcagtcagaggcgatgaaggacgtgctaatctgcgataagcgtcggtaaggtgatatgaaccgttataaccggcgatttccgaatggggaaacccagtgtgtttcgacacactatcattaactgaatccataggttaatgaggcgaaccgggggaactgaaacatctaagtaccccgaggaaaagaaatcaaccgagattcccccagtagcggcgagcgaacggggagcagcccagagcctgaatcagtgtgtgtgttagtggaagcgtctggaaaggcgcgcgatacagggtgacagccccgtacacaaaaatgcacatgctgtgagctcgatgagtagggcgggacacgtggtatcctgtctgaatatggggggaccatcctccaaggctaaatactcctgactgaccgatagtgaaccagtaccgtgagggaaaggcgaaaagaaccccggcgaggggagtgaaaaagaacctgaaaccgtgtacgtacaagcagtgggagcacgcttaggcgtgtgactgcgtaccttttgtataatgggtcagcgacttatattctgtagcaaggttaaccgaataggggagccgaagggaaaccgagtcttaactgggcgttaagttgcagggtatagacccgaaacccggtgatctagccatgggcaggttgaaggttgggtaacactaactggaggaccgaaccgactaatgttgaaaaattagcggatgacttgtggctgggggtgaaaggccaatcaaaccgggagatagctggttctccccgaaagctatttaggtagcgcctcgtgaattcatctccgggggtagagcactgtttcggcaagggggtcatcccgacttaccaacccgatgcaaactgcgaataccggagaatgttatcacgggagacacacggcgggtgctaacgtccgtcgtgaagagggaaacaacccagaccgccagctaaggtcccaaagtcatggttaagtgggaaacgatgtgggaaggcccagacagccaggatgttggcttagaagcagccatcatttaaagaaagcgtaatagctcactggtcgagtcggcctgcgcggaagatgtaacggggctaaaccatgcaccgaagctgcggcagcgacgcttatgcgttgttgggtaggggagcgttctgtaagcctgcgaaggtgtgctgtgaggcatgctggaggtatcagaagtgcgaatgctgacataagtaacgataaagcgggtgaaaagcccgctcgccggaagaccaagggttcctgtccaacgttaatcggggcagggtgagtcgacccctaaggcgaggccgaaaggcgtagtcgatgggaaacaggttaatattcctgtacttggtgttactgcgaaggggggacggagaaggctatgttggccgggcgacggttgtcccggtttaagcgtgtaggctggttttccaggcaaatccggaaaatcaaggctgaggcgtgatgacgaggcactacggtgctgaagcaacaaatgccctgcttccaggaaaagcctctaagcatcaggtaacatcaaatcgtaccccaaaccgacacaggtggtcaggtagagaataccaaggcgcttgagagaactcgggtgaaggaactaggcaaaatggtgccgtaacttcgggagaaggcacgctgatatgtaggtgaggtccctcgcggatggagctgaaatcagtcgaagataccagctggctgcaactgtttattaaaaacacagcactgtgcaaacacgaaagtggacgtatacggtgtgacgcctgcccggtgccggaaggttaattgatggggttagcgcaagcgaagctcttgatcgaagccccggtaaacggcggccgtaactataacggtcctaaggtagcgaaattccttgtcgggtaagttccgacctgcacgaatggcgtaatgatggccaggctgtctccacccgagactcagtgaaattgaactcgctgtgaagatgcagtgtacccgcggcaagacggaaagaccccgtgaacctttactatagcttgacactgaacattgagccttgatgtgtaggataggtgggaggctttgaagtgtggacgccagtctgcatggagccgaccttgaaataccaccctttaatgtttgatgttctaacgttgacccgtaatccgggttgcggacagtgtctggtgggtagtttgactggggcggtctcctcctaaagagtaacggaggagcacgaaggttggctaatcctggtcggacatcaggaggttagtgcaatggcataagccagcttgactgcgagcgtgacggcgcgagcaggtgcgaaagcaggtcatagtgatccggtggttctgaatggaagggccatcgctcaacggataaaaggtactccggggataacaggctgataccgcccaagagttcatatcgacggcggtgtttggcacctcgatgtcggctcatcacatcctggggctgaagtaggtcccaagggtatggctgttcgccatttaaagtggtacgcgagctgggtttagaacgtcgtgagacagttcggtccctatctgccgtgggcgctggagaactgaggggggctgctcctagtacgagaggaccggagtggacgcatcactggtgttcgggttgtcatgccaatggcactgcccggtagctaaatgcggaagagataagtgctgaaagcatctaagcacgaaacttgccccgagatgagttctccctgactccttgagagtcctgaaggaacgttgaagacgacgacgttgataggccgggtgtgtaagcgcagcgatgcgttgagctaaccggtactaatgaaccgtgaggcttaaccttacaacgccgaaggtgttttggcggattgagagaagattttcagcctgatacagattaaatcagaacgcagaagcggtctgataaaacagaatttgcctggcggcagtagcgcggtggtcccacctgaccccatgccgaactcagaagtgaaacgccgtagcgccgatggtagtgtggggtctccccatgcgagagtagggaactgccaggcatcaaattagaaaaaccccggtccataaggccggggttttttgcatatcaattatttgcatgatgaagggaatctcatgagtgttctgtatatccaaattcgtcgtaatcaaattactgttcgcgatcttgaaagcaaacgtgaagtgagtggagacgctgccttcagtaaccagcgcctgttaatcgccaatttctttgttgcagaaaaagttctgcaagatcttgttctgcaactccacccacgtagtacctggcattcttttttgccagcaaaacgtatggatattgttgtgagcgcactggaaatgaatgagggcggtttgagtcaggttgaggaacgcattctccatgaagtggtcgctggggcaacgttaatgaaatatcgccagttccacatccatgcgcaaagtgcggtactcagtgatagtgcggtcatggcaatgcttaagcagaaataatcgtgtcaccattggtgggtactaaacctgaagttcagcccaccgggatgagaaaaaatcgcttacgcccccacatacgccagattcagcaacggatacggtttccccaaatcgtccacctcagagcgtcccgtaaccttaaaacccaccttcttatagaacccaaccgcctgctcattttgctcattaacgttggttgtcagttccggtgccatgctgagcgcatgctccaccagcacccgacctacgccgcagccgcgcacatcaggatcgataaacagcgcatccatatgctgcccacttagcaacataaatccaaccggctgatcccgctcattaaccgcgacccacaacggcgcttccggcaggaaggaacgaactaggtcctccagctcggtccgatactctgcacttagaaaatcgtgagtggcatcgacagaacgacaccaaatcgcaacgagttcctccccttcctcatgccgactgcggcgaatactaataaccattttctctccttttagtcattcttatattctaacgtagtcttttccttgaaactttctcaccttcaacatgcaggctcgacattggcaaattttctggttatcttcagctatctggatgtctaaacgtataagcgtatgtagtgaggtaatcaggttatgccgattcgtgtgccggacgagctacccgccgtcaatttcttgcgtgaagaaaacgtctttgtgatgacaacttctcgtgcgtctggtcaggaaattcgtccacttaaggttctgatccttaacctgatgccgaagaagattgaaactgaaaatcagtttctgcgcctgcttagtaacagtcctttgcaggtcgatattcagctgttgcgcatcgattcccgtgaaagccgcaacacgcccgcagagcatctgaacaacttctactgtaactttgaagatattcaggatcagaactttgacggtttgattgtaactggtgcgccgctgggcctggtggagtttaatgatgtcgcttactggccgcagatcaaacaggtgctggagtggagcaaagatcacgtcaccagcacgctgtttgtctgctgggcggtacaggccgcgctcaatatcctctacggcattcctaagcaaactcgcaccgaaaaactctctggcgtttacgagcatcatattctccatcctcatgcgcttctgacgcgtggctttgatgatagtttcctggcaccgcatagccgctatgctgactttccggcagcgttgattcgtgattacaccgatctggaaattctggcagagacggaagaaggggatgcatatctgtttgccagtaaagataagcgcattgcctttgtgacgggccatcccgaatatgatgcgcaaacgctggcgcaggaatttttccgcgatgtggaagccggactagacccggatgtaccgtataactatttcccgcacaatgatccgcaaaatacaccgcgagcgagctggcgtagtcacggtaatttactgtttaccaactggctcaactattacgtctaccagatcacgccatacgatctacggcacatgaatccaacgctggattaatcttctgtgatagtcgatcgttaagcgattcagcaccttacctcaggcaccttcgggtgccttttttatttccgaaacgtacctcagcaggtgaataaattttattcatattgttatcaacaagttatcaagtatttttaattaaaatggaaattgtttttgattttgcattttaaatgagtagtcttagttgtgctgaacgaaaagagcacaacgatccttcgttcacagtggggaagttttcggatccatgacgaggagctgcacgatgactgaacaggcaacaacaaccgatgaactggctttcacaaggccgtatggcgagcaggagaagcaaattcttactgccgaagcggtagaatttctgactgagctggtgacgcattttacgccacaacgcaataaacttctggcagcgcgcattcagcagcagcaagatattgataacggaacgttgcctgattttattagcgaaacagcttccattcgcgatgctgattggaaaattcgcgggattcctgcggacttagaagaccgccgcgtagagataactggcccggtagagcgcaagatggtgatcaacgcgctcaacgccaatgtgaaagtctttatggccgatttcgaagatagtctggcaccagactggaacaaagtgatcgacgggcaaattaacctgcgtgatgcggttaacggcaccatcagttacaccaatgaagcaggcaaaatttaccagctcaagcccaatccagcggttttgatttgtcgggtacgcggtctgcacttgccggaaaaacatgtcacctggcgtggtgaggcaatccccggcagcctgtttgattttgcgctctatttcttccacaactatcaggcactgttggcaaagggcagtggtccctatttctatctgccgaaaacccagtcctggcaggaagcggcctggtggagcgaagtcttcagctatgcagaagatcgctttaatctgccgcgcggcaccatcaaggcgacgttgctgattgaaacgctgcccgccgtgttccagatggatgaaatccttcacgcgctgcgtgaccatattgttggtctgaactgcggtcgttgggattacatcttcagctatatcaaaacgttgaaaaactatcccgatcgcgtcctgccagacagacaggcagtgacgatggataaaccattcctgaatgcttacagtcgcctgttgattaaaacctgccataaacgcggtgcttttgcgatgggcggcatggcggcgtttattccgagcaaagatgaagagcacaataaccaggtgctcaacaaagtaaaagcggataaaagcctggaagccaataacggtcacgatggcacatggatcgctcacccaggccttgcggacacggcaatggcggtattcaacgacattctcggctcccgtaaaaatcagcttgaagtgatgcgcgaacaagacgcgccgattactgccgatcagctgctggcaccttgtgatggtgaacgcaccgaagaaggtatgcgcgccaacattcgcgtggctgtgcagtacatcgaagcgtggatctctggcaacggctgtgtgccgatttatggcctgatggaagatgcggcgacggctgaaatttcccgtaccagcatctggcagtggatccatcatcaaaaaacgttgagcaatggcaaaccggtgaccaaagccttgttccgccagatgctgggcgaagagatgaaagtcattgccagcgaactgggcgaagaacgtttctcccaggggcgttttgacgatgccgcacgcttgatggaacagatcaccacttccgatgagttaattgatttcctgaccctgccaggctaccgcctgttagcgtaaaccaccacataactatggagcatctgcacatgaaaacccgtacacaacaaattgaagaattacagaaagagtggactcaaccgcgttgggaaggcattactcgcccatacagtgcggaagatgtggtgaaattacgcggtagtgtcaatcctgaatgcacgctggcgcaactgggcgcagcgaaaatgtggcgtctgctgcacggtgagagcaaaaaaggctacatcaacagcctcggcgcactgactggcggtcaggcgctgcaacaggcgaaagcgggtattgaagcagtctatctgagcggatggcaggtagcggcggacgctaacctggcggccagcatgtatccggatcagagcctctatccggcaaacagcgtgccagctgtggtggagcggatcaacaacaccttccgtcgtgccgatcagatccaatggtccgcgggcattgagccgggcgatccgcgctatgtcgattacttcctgccgatcgttgccgatgcggaagccggttttggcggtgtcctgaatgcctttgaactgatgaaagcgatgattgaagccggtgcagcggcagttcacttcgaagatcagctggcgagtgtgaagaaatgcggtcacatgggcggcaaagttttagtgccaactcaggaagctattcagaaactggtcgcggcgcgtctggcagctgacgtgacgggcgttccaaccctgctggttgcccgtaccgatgctgatgcggcggatctgatcacctccgattgcgacccgtatgacagcgaatttattaccggcgagcgtaccagtgaaggcttcttccgtactcatgcgggcattgagcaagcgatcagccgtggcctggcgtatgcgccatatgctgacctggtctggtgtgaaacctccacgccggatctggaactggcgcgtcgctttgcacaagctatccacgcgaaatatccgggcaaactgctggcttataactgcagcccgagcttcaactggcagaaaaacctcgacgacaaaactattgccagcttccagcagcagctgagcgatatgggctacaagttccagttcatcaccctggcaggtatccacagcatgtggttcaacatgtttgacctggcaaacgcctatgcccagggcgagggtatgaagcactacgttgagaaagtgcagcagccggaatttgccgccgcgaaagatggctataccttcgtatctcaccagcaggaagtgggtacaggttacttcgataaagtgacgactattattcagggcggcacgtctagtgtcaccgcgctgaccggctccactgaagaaagccagttctaagcaacaacaaccgttgctgactgtaggccggataaggcgttcacgccgcatccggcaatcggtgcacgatgcctgatgcgacgcttgcgcgtcttatcatgcctacagccgttgccgaacgtaggctggataaggcgtttacgccgcatccggcaattctctgctcctgatgagggcgctaaatgccgcgtggcctggaattattgattgctcaaaccattttgcaaggcttcgatgctcagtatggtcgattcctcgaagtgacctccggtgcgcagcagcgtttcgaacaggccgactggcatgctgtccagcaggcgatgaaaaaccgtatccatctttacgatcatcacgttggtctggtcgtggagcaactgcgctgcattactaacggccaaagtacggacgcggcatttttactacgtgttaaagagcattacacccggctgttgccggattacccgcgcttcgagattgcggagagcttttttaactccgtgtactgtcggttatttgaccaccgcagccttactcccgagcggctttttatctttagctctcagccagagcgccgctttcgtaccattccccgcccgctggcgaaagactttcaccccgatcacggctgggaatctctactgatgcgcgttatcagcgacctaccgctgcgcctgcgctggcagaataaaagccgtgacatccattacattattcgccatctgacggaaacgctggggacagacaacctcgcggaaagtcatttacaggtggcgaacgaactgttttaccgcaataaagccgcctggctggtaggcaaactgatcacaccttccggcacattgccatttttgctgccgatccaccagacggacgacggcgagttatttattgatacctgcctgacgacgaccgccgaagcgagcattgtttttggctttgcgcgttcttattttatggtttatgcgccgctgcccgcagcgctggtcgagtggctacgggaaattctgccaggtaaaaccaccgctgaattgtatatggctatcggctgccagaagcacgccaaaaccgaaagctaccgcgaatatctcgtttatctacagggctgtaatgagcagttcattgaagcgccgggtattcgtggaatggtgatgttggtgtttacgctgccgggctttgatcgggtattcaaagtcatcaaagacaggttcgcgccgcagaaagagatgtctgccgctcacgttcgtgcctgctatcaactggtgaaagagcacgatcgcgtgggccgaatggcggacacccaggagtttgaaaactttgtgctggagaagcggcatatttccccggcattaatggaattactgcttcaggaagcagcggaaaaaatcaccgatctcggcgaacaaattgtgattcgccatctttatattgagcggcggatggtgccgctcaatatctggctggaacaagtggaaggtcagcagttgcgcgacgccattgaagaatacggtaacgctattcgccagcttgccgctgctaacattttccctggcgacatgctgtttaaaaacttcggtgtcacccgtcacgggcgtgtggttttttatgattacgatgaaatttgctacatgacggaagtgaatttccgcgacatcccgccgccgcgctatccggaagacgaacttgccagcgaaccgtggtacagcgtcagcccgggcgatgttttcccggaagagtttcgccactggctatgcgccgacccgcgtattggtccgctgtttgaagagatgcacgccgacctgttccgcgctgattactggcgcgcactacaaaaccgcatacgtgaagggcatgtggaagatgtttatgcgtatcggcgcaggcaaagatttagcgtacggtatggggagatgcttttttgagtaaagcttccatataatttttctccgcaatgtatcgagggttatccgtaaagccaaagctttcagccatcttatttaatgtattaaggattaattcagcaataacccggtgaccaaattcaaaagccaactcaaaggcagagtatttttgtggggctttgtgttgccaaaaatccataatatcttcagcggtaaatccaaacaggcgtgcatggtcagataaagcaagataaaccgtctctacaacattttgttgtttatgctgtatcgcactaaacaaaccgggatattcattagaattatttgccaggaggaggggcttcatattttttttatcgaatttaaacgtattaaacagagtgggtaatgcgttaaaaatagtattaataacgttcatgtgtccgcgctgcatggccataaacaaacccgtgtcgcgcgcaagacttttagcggtcagaagatctacaatatcggaagcactaatgttaatttcctgggctaggctgggcaatgcttcaagaataactttcacgatatcgctatgtccattttgcatcgccagatatagtcctgggcaaccataaaaatcctttgccttcaggagatcgagtacctgttctttagtcaaatgacatgtgcgaattaacaaaggtaacgcgttcaaaacaattttcagcatgtcggcatcaccattcgccataacatggtataaaacatggctggacgttctatttttggcactcaggaatttatacacttgttcgttatctaaatgatgtgttgcggccagtttaggtaaggcgttcagaatgctggttacaacatttttatccttacgacttatcgctaaaaataatccagaaaaaccatttttatcttttgcctccagaatatgcatgagattttttttgctgagtaatccttcatatcctgtttcactcaaactattgaaaatagtctcaacgatatccgcattaccataatttatagccaaatataaacctggcaggttaatactattataggcagtcaacatttctgttctatgtagttctggcattttctggagttgaatcatcagttgcgtaagttggtgattctgaccaattgccattagcaaattcatcgttgcaggacttaatggaggggttatttcatccacagatccttttaacatcaatagctgttctttcggaagtgctggaattattgcaacagattgattaataacatgatcattactccatttcaggaggctataatctacattcataaaatccatcagagaatagtgtttaatattctctttgctttcgctcataattcttattttatcgttagttacattaggatcataaacgctaaccacgtaatgggtacatccttcagttgtgttctttattcttagccggaccgtcaaagcatggttatccaccagtaatatggctgccataacactgatgccattactttccatcttgtcaaaatatgctttcataactagcccgaaatcaccgcaggcagcaacgcaacgcccctcaggacggctggaaaccaacgccaaagtctggtttttgcattttttgttgaagtgcgtgagaaatttttcagcactagagtaatcatcttgatggggtttgtaatcaacattctgataaatatcattaatatattgtgcagcaatgtgtcggcatactatacggttttggggtcgccccggaaaataacattgaccattaagtttaattcttgggaattctttttcttttctatcactttttaggtttaattcttgtttatcaagagtgtcactgcgttgaggtaaaatttccattaggtatttttcaaatattggggcaatggtttgagtaagtgtcgtgttttcgtttttattaattatcgtaatttctttcttatcagcttgtaagacggacgtggaaaatttaatgacaaaatccttgttgctaaagatatgacgaccattttgtctacagttctcactgaagctttttaatagaggcgtcgccagctccttgccagaaaatttatcctcgagttctttataaaacaattcactcagggtttggtgttcatttgtctgggctgtattattaatatttgcagagaaagaactacgaggaatacgagtaatcatttaaatatctcattgtttattgatgtcttgaattttaactatcagaacagtgaaaaaatttaatatgattacaactaaagaaatatcataaatcgctcaatctcataatgcagccgtaaaagtttcggtggaatgagatcttgcgattttgttaataattaagtggtttgatgtttaaaaataatgctgagttaataaaagtgtgtgaagtgtatgacattaagttattttggcgtcaatgcgattaacagacacccttattctattgccactcaggtatgatgggcagaatattgcctctgcccgccagaaaaagtcagcgcattccaccgtacgccagcgtcacttccttcgccgctttaatcaccatcgcgccaaactcggtcacgcggtcatcggtaatacgactaatcggtccggaaatagaaattgcggcaaacggttcacggtgctcatcgaaaatacacgctgcaaggcaacgtagccccagtgcatgttcctcatcgtcaaaactataaccccgtttgcgcgtttgggcgagatcttcttttaaatgcacaggagacaccagcgttgcgtgggtataggcatgtaaccctttgcggtgcagcagcttcgtcacctgttcttcgctcagttgggctaaaaaggctttacccgcaccggaagcgtgcatcggcaatttaccgccgataggcgcggacattcgcatcagatgcgtacactgtacctggtcgataataatcgcttcgtgatcgctttgatcaagcaccgccatattgaccgtttcgccagactcttccattagattgcgcaggatagggtgaacaatcgctaacaaattacggctctggagaaagctgctgccgaccataaaggcatgtgcgccgattgcccaatgtcccagttcgccaacctgacgcacgaaaccctgctgttgcatcgtggttagcaggcggtgggtcgtggaattgggtaacccggcttgttgcgccagttccgtgagtgccacactgccattggattcggcaatccactccagtaatttcaggccacgcgttaaagactgaacctgtccagtcgctggtgcggtggcaacggcgggttttctgccgcgtttcgcgggaatgggtgcgaccatgacagtctcttttttctgtatcgtggaaatcattttcatttttattgttagctaatgcaatagttactgaactgatccgatgagttaatgttgaacaaatctcatgttgcgtggtggtcgcttttaccacagatgcgtttatgccagtatggtttgttgaatttttattaaatctgggttgagcgtgtcgggagcaagtgtgagcagcaaagtggaacaactgcgtgcgcagttaaatgaacgtattctggtgctggacggcggtatgggcaccatgatccagagttatcgactgaacgaagccgattttcgtggtgaacgctttgccgactggccatgcgacctcaaaggcaacaacgacctgctggtactcagtaaaccggaagtgatcgccgctatccacaacgcctactttgaagcgggcgcggatatcatcgaaaccaacaccttcaactccacgaccattgcgatggcggattaccagatggaatccctgagcgcggaaatcaactttgcggcggcgaaactggcgcgagcttgtgctgacgagtggaccgcgcgcacgccagagaaaccgcgctacgttgccggtgttctcggcccgaccaaccgcacggcgtctatttctccggacgtcaacgatccggcatttcgtaatatcacttttgacgggctggtggcggcttatcgagagtccaccaaagcgctggtggaaggtggcgcggatctgatcctgattgaaaccgttttcgacacccttaacgccaaagcggcggtatttgcggtgaaaacggagtttgaagcgctgggcgttgagctgccgattatgatctccggcaccatcaccgacgcctccgggcgcacgctctccgggcagaccaccgaagcattttacaacagtttgcgccacgccgaagctctgacctttggcctgaactgtgcgctggggcccgatgaactgcgccagtacgtgcaggagctgagtcggattgcggaatgctacgtcaccgcgcacccgaacgccgggctacccaacgcctttggtgagtacgatctcgacgccgacacgatggcaaaacagatacgtgaatgggcgcaagcgggttttctcaatatcgtcggcggctgctgtggcaccacgccacaacatattgcagcgatgagtcgtgcagtagaaggattagcgccgcgcaaactgccggaaattcccgtagcctgccgtttgtccggcctggagccgctgaacattggcgaagatagcctgtttgtgaacgtgggtgaacgcaccaacgtcaccggttccgctaagttcaagcgcctgatcaaagaagagaaatacagcgaggcgctggatgtcgcgcgtcaacaggtggaaaacggcgcgcagattatcgatatcaacatggatgaagggatgctcgatgccgaagcggcgatggtgcgttttctcaatctgattgccggtgaaccggatatcgctcgcgtgccgattatgatcgactccagtaaatgggacgtcattgaaaaaggtctgaagtgtatccagggcaaaggcattgttaactctatcagcatgaaagagggcgtcgatgcctttatccatcacgcgaaattgttgcgtcgctacggtgcggcagtggtggtaatggcctttgacgaacagggacaggccgatactcgcgcacggaaaatcgagatttgccgtcgggcgtacaaaatcctcaccgaagaggttggcttcccgccagaagatatcatcttcgacccaaacatcttcgcggtcgcaactggcattgaagagcacaacaactacgcgcaggactttatcggcgcgtgtgaagacatcaaacgcgaactgccgcacgcgctgatttccggcggcgtatctaacgtttctttcagcttccgtggcaacgatccggtgcgcgaagccattcacgcagtgttcctctactacgctattcgcaatggcatggatatggggatcgtcaacgccgggcaactggcgatttacgacgacctacccgctgaactgcgcgacgcggtggaagatgtgattcttaatcgtcgcgacgatggcaccgagcgtttactggagcttgccgagaaatatcgcggcagcaaaaccgacgacaccgccaacgcccagcaggcggagtggcgcagctgggaagtgaataaacgtctggaatacagcctggtcaaaggcattaccgagtttatcgagcaggataccgaagaagcccgccagcaggctacgcgcccgattgaagtgattgaaggcccgttgatggacggcatgaatgtggtcggcgacctgtttggcgaagggaaaatgttcctgccacaggtggtcaaaagcgcgcgcgtcatgaaacaggcggtggcctacctcgaaccgtttattgaagccagcaaagagcagggcaaaaccaacggcaagatggtgatcgccaccgtgaagggcgacgtccacgacatcggtaaaaatatcgttggtgtggtgctgcaatgtaacaactacgaaattgtcgatctcggcgttatggtgcctgcggaaaaaattctccgtaccgctaaagaagtgaatgctgatctgattggccttagcgggcttatcacgccgagcctggacgagatggttaacgtggcgaaagagatggagcgtcagggcttcactattccgttactgattggcggcgcgacgaccagtaaagcgcacacggcggtgaaaatcgagcagaactacagcggcccgacggtgtatgtgcagaatgccagccgtaccgttggtgtggtggcggcgctgctttccgatacccagcgtgatgattttgtcgctcgtacccgcaaggagtacgaaaccgtacgtattcagcacgggcgcaagaaaccgcgcacaccaccggtcacgctggaagcggcgcgcgataacgatttcgcttttgactggcaggcttacacgccgccggtggcgcaccgtctcggcgtgcaggaagtcgaagccagcatcgaaacgctgcgtaattacatcgactggacaccgttctttatgacctggagcctggccgggaagtatccgcgcattctggaagatgaagtggtgggcgttgaggcgcagcggctgtttaaagacgccaacgacatgctggataaattaagcgccgagaaaacgctgaatccgcgtggcgtggtgggcctgttcccggcaaaccgtgtgggcgatgacattgaaatctaccgtgacgaaacgcgtacccatgtgatcaacgtcagccaccatctgcgtcaacagaccgaaaaaacaggcttcgctaactactgtctcgctgacttcgttgcgccgaagctttctggtaaagcagattacatcggcgcatttgccgtgactggcgggctggaagaggacgcactggctgatgcctttgaagcgcagcacgatgattacaacaaaatcatggtgaaagcgcttgccgaccgtttagccgaagcctttgcggagtatctccatgagcgtgtgcgtaaagtctactggggctatgcgccgaacgagaacctcagcaacgaagagctgatccgcgaaaactaccagggcatccgtccggcaccgggctatccggcctgcccggaacatacggaaaaagccaccatctgggagctgctggaagtggaaaaacacactggcatgaaactcacagaatctttcgccatgtggcccggtgcaagcgttagcggttggtacttcagccacccggacagcaagtactacgctgtagcacaaattcagcgcgatcaggttgaagattatgcccgccgtaaaggtatgagcgttaccgaagttgagcgctggctggcaccgaatctggggtatgacgcggactgattcacaaatctgtcacttttccttacaacaaacagggcgctcaatgagtgccctgtctctttattaatatgaaacacttatactggaaacaggctggaataatcttagccggaaaaacgaatgtcaaaaggcacagtaaagatgccagtcagcgtgtttccggtcctttggtcattcaattgcttcaggaacatataacgataaggagaacctgaactcgtgttaacgctgcttcacctgctttctgccgtcgccctgctggtctgggggactcatattgttcgaaccggcgtaatgcgcgtcttcggcgcgcgtttgcgtactgtccttagccggagcgtcgaaaaaaagccgctcgccttttgcgcggggatcggcgttaccgcactggtacagagcagtaatgccaccaccatgctggtgaccagctttgtcgctcaggatctggtagccctcgcaccggctctggtcattgtgctgggtgcagatgtcgggacggcgctaatggcgcgtattctcaccttcgacttatcctggctgagtccgttacttatttttatcggcgtgatttttttcctcggacgcaaacagagtcgcgccgggcaactgggccgcgtcggtattggtcttgggctgattttgctagcgctggagttgattgtgcaggccgtaacgccgatcacccaggcaaacggcgttcaggtgatctttgccagcctgaccggcgatattctgctggatgcgctgattggcgcgatgttcgccattatcagctactccagccttgctgctgtactgctgaccgcgactctgaccgccgcaggcattatctccttccccgtggcgctctgtctggtgattggtgctaacctcggttccggtctgctggcaatgctcaacaacagtgccgccaatgccgcagcccgccgtgtcgcgctgggtagtctgctgtttaagctggtgggtagcctgattatcctgccgtttgtccatttgctggcagagacaatggggaagttgagtttgccaaaagcggaactggtgatctatttccacgtcttctacaaccttgtacgttgcctggtcatgctgccatttgttgacccgatggcacggttttgcaaaacgattattcgcgatgaaccggaactggatacccagctacggcctaaacatctggatgtcagcgcgctggatacgcccacgcttgctctggcgaacgccgcgcgcgaaaccctgcgcattggcgacgccatggaacagatgatggaagggttgaataaagtgatgcacggtgagccacggcaggagaaagagctgcgtaagctggcagatgatatcaacgttctctacaccgccattaagctgtatctggcgcggatgccaaaagaagagctggcggaggaagagagccgccgctgggcagagatcatcgaaatgagcctcaaccttgaacaggcctccgatatcgtcgagcgcatgggcagcgaaattgctgacaaaagtctggcagcacggcgggcatttagccttgatgggttgaaggaactggatgcgctctatgagcaattgctcagtaatttaaagctggcaatgagcgtgttcttctctggcgatgtcaccagcgctcgtcgtttgcgtcgcagcaaacatcgttttcgcattcttaatcgccgctattcccacgcccacgtcgatcgcctgcatcagcaaaacgtgcagagcattgaaaccagtagcctacatttaggcttactgggagatatgcagcgcctgaacagcctgttttgtagcgtggcttacagtgtgctggaacagccggatgaagatgaaggacgggacgagtattaatattgtgaatcctgtaggcctgataagacgcgtcaagcgtcgcatcaggcactatgaacaagatgccggatcatgcatccggcaattcacttaaaaacggtgaccagcttccagcggaaccgcttcttcaccagccttaaacacataagtggtgttcgggccacccagcgtagcgtgacctttactcactgtgatccagttaccttccggtagaccaataatcgtcagttctggcgcgacgaccagcagttcgcgaatacgctgctcacgggtttcacctttatggccttccggcagcgcgttggtgaagtgcgggttgatttgcagcgggaacagatttagcgcatcgaaaccttgcggatcgacaatcggcatatcgttggtggtacgaatagttgggcaagcaaggttagcgcctgcgctccagccaatatacagagcgccacgtttaaccacgtcagtaattggtgccagcagcccgcgctcgcggcactgtttcagcaactggaaagtattcccgccgccgacaatcacgatctcagcattttcaatcgcggcaacgggatcgacaacgctatgaataccggtgacagaaacacccagcggagcgagaaccgcagccgttttcgctgtgtaatcatcccaggtctgcgttacgccagcgaaagggataaacaccgcactgcggcgaccctgcaactgttcagcaattagcggcagtgcatgttccagccaggctttacccggcagcgtgctgttactcaataaaagcagttccattacttctccggttagtaagaaatcacgggaggcatgctaccactgcgaatttaaccacttactgacatggctcacgatgtcgcacattgcttctggaaagtgatttgagcaggtaacgaattcaagccaatggaaataacaaatagttcgctcatgactattttttatcaacccaaaggtacggtatattccgttttttacaggagaatttatgctgcccgacagtagtgtccgtttaaataaatacatcagcgaaagcggaatttgcagtcgccgcgaagcggatcgctatatcgagcaaggcaatgtgttccttaatggcaagcgagccaccattggcgatcaggtgaaacccggcgacgttgtgaaagtaaacggtcagttgattgaacctcgggaagccgaagatttggtacttatcgccctgaacaagcccgttggtattgtaagcaccaccgaagatggcgagcgcgataacattgtcgatttcgttaaccacagcaaacgcgtgttcccgattggccgcctggataaagactcccaggggctgattttcctcaccaatcacggcgatctggtgaataagatcctgcgtgctggcaatgatcatgagaaagagtatctggtgacggtcgataaaccgattaccgaggagtttattcgcggcatgagtgcgggggtgccaatcctcgggacagtgaccaaaaagtgcaaagttaaaaaagaagcgccgtttgtcttccgcattaccctggtgcaggggctgaaccgtcagatccggcgcatgtgcgagcatttcggctatgaagtgaaaaagctggaacgcacgcgcatcatgaacgttagcttaagcggcattccgctgggggaatggcgcgatttaaccgacgatgagttaatcgacctctttaagctcattgaaaattcctcttccgaggtaaaacctaaagcgaaggccaaaccgaaaacagcgggcatcaaacgtccagtcgttaagatggaaaaaacggcggaaaaaggcggtcgcccggcgtccaacggtaagcgttttaccagcccggggcgtaaaaagaaggggcgctgattaacgcctcagactgatgaaaacggcccaaaagtgcccggacagtcccctcgccccttcgggaaaagggttagggtgaggggaaaattgtgttcacactgacgagtgaaaatctcaggcgttgattgtggattagcgcctgccgcgcgtgctcgtatttgcactccagctaaaactcgcttcaggatccggtttataagcctgctttttcttcaactggcgggcttttttcgcttcagcctcacgctcaaccattaatttatcgatgtaatctttcttaatgctgttggtttcggagttggtcaatacgcgaccatgcgcaatccgcgcccgatccagcagtgttttaagttcacgctgctcgcgttcagtcatctctttttgggtaatacgggggagtgccatgatggtgccctcagtgagccagagagttcagtgtacgggaattcgtttgcgagcagaactgataatattcattttgccttctcttaactatttatctctttcgataattaattagagatgcagataaaaaaattaaaggcaattattctccgataaagacgctggttaacagagtacaggctcgtttattgatgagcatagtgacaagaaaatcaatacggcccgaaatatagcttccaggccatacagtatttactcaaacaaattactatgcagtttttgcaccacctgctcggcatcttcgccgggcaccaggaagcacaggttatggctggatgcgccataacaaatcatgcgaatgttgaacggttccagtacgccgaatacctctttgccaacgccgcaggctttactcaggtcattgccaatcaacgcgaccagcgccagaccttcttccacctccacccgacacagtgcggaaagctccatcagcagagattgcgtcagcaacgtatcgccagtggaggtactaccggtggtatcaagggttaatgccacgctcacttcactcgtggtgattaagtctacgctaatattatgccgcgcgaggatgccgaaaacttccgcgaggaaaccgcgagaatgcagcatattcaggctgtgcaaagtgagcagagtctgattgcgacgaagcgccagagcgcggaacagcggcggattttcagttttattgcacaccagcgtaccacctgcgcgtgggtctttgctggagccgacaaagaccgggatatcgctgcgtactgcgggtagcaacgttgccggatgcagtacttttgcaccaaaagttgccatctctgccgcttcggcaaacgcgatttcatcaatgcgttttgctgcggaaactacgcgtggatcggtggtgtagatgcccgggacgtcggtccagatatcaacacgagatgcgtgtaaagcctccgccagcaaggctgccgtataatcgctgcctccacggccaagcgtcgttgtacgacctttattttcgctaccgataaatccctgggtgatcactaagccttcattgagacgtgggagcagctgcagcgcggccagttccgccagcgcggctatatctggctctgcacgaccaaatcggtcgttggtacgcatcactttacgtacatcaaaccactgtgcctgaacatcgcgttcgcgcaggatctcaacaaacagcagggtgctcatcagctcgccgtggctgaccagctcatctgtcagcgccggagacgttgccagcgccgccgcttctgccagaacagtaatgttctccagcagacgttcaatctcttcacggataacgttcgggtaacgcagacgttccagaatggcaaactggatgttgcggatagcgtcgagtttttcgaatcgctcgccaggttccagtccttcagctaaagcgaccagcagattagtgataccagcagaagcgctgaggacaactaaacgcacgttggcatcagaaagcacaatatcagcgctgcggttcatggcgtcaaaatcagctacgctggtaccgccaaatttggagacaacaatttcagacataactacctcgtgtcaggggatccattttcagccttggcacaagggaagagcggaagacgggtgggcgcagagcgatacttcgctactattttcacccagaagtgctccaccacttgcgaaacgcccgactgcgaacgcttctggtgacaacccaggggattcagcccctgtagccgatgatgaacgtggccagccgttcaatcacctcggcgatgcaccccctcaggtgttatcacaggactggctcctccaacaccgttacttgggcaacgcgcctcttctggcctgcgctagcgcaggtagtacatttataaataaagggtgagcggggcggttgtcaacgatggggtcatgcggatttttcatccactcctggcggtcagtagttcagctaataaatgcttcactgcgctaagggtttacactcaacattacgctaacggcactaaaaccatcacatttttctgtgactggcgctacaatcttccaaagtcacaattctcaaaatcagaagagtattgctaatgaaaaacatcaatccaacgcagaccgctgcctggcaggcactacagaaacacttcgatgaaatgaaagacgttacgatcgccgatctttttgctaaagacggcgatcgtttttctaagttctccgcaaccttcgacgatcagatgctggtggattactccaaaaaccgcatcactgaagagacgctggcgaaattacaggatctggcgaaagagtgcgatctggcgggcgcgattaagagcatgttctctggcgagaagatcaaccgcactgaaaaccgcgccgtgctgcacgtagcgctgcgtaaccgtagcaataccccgattttggttgatggcaaagacgtaatgccggaagtcaacgcggtgctggagaagatgaaaaccttcagtgaagcgattatttccggtgagtggaaaggttataccggcaaagcaatcactgacgtagtgaacatcgggatcggcggttctgacctcggcccatacatggtgaccgaagctctgcgtccgtacaaaaaccacctgaacatgcactttgtttctaacgtcgatgggactcacatcgcggaagtgctgaaaaaagtaaacccggaaaccacgctgttcttggtagcatctaaaaccttcaccactcaggaaactatgaccaacgcccatagcgcgcgtgactggttcctgaaagcggcaggtgatgaaaaacacgttgcaaaacactttgcggcgctttccaccaatgccaaagccgttggcgagtttggtattgatactgccaacatgttcgagttctgggactgggttggcggccgttactctttgtggagtgcgattggcctgagcattgttctctccatcggctttgataacttcgttgaactgctttccggcgcacacgcgatggacaagcatttctccaccacgcctgccgagaaaaacctgcctgtactgctggcgctgattggcatctggtacaacaatttctttggtgcggaaactgaagcgattctgccgtatgaccagtatatgcaccgtttcgcggcgtacttccagcagggcaatatggagtccaacggtaagtatgttgaccgtaacggtaacgttgtggattaccagactggcccgattatctggggtgaaccaggcactaacggtcagcacgcgttctaccagctgatccaccagggaaccaaaatggtaccgtgcgatttcatcgctccggctatcacccataacccgctctctgatcatcaccagaaactgctgtctaacttcttcgcccagaccgaagcgctggcgtttggtaaatcccgcgaagtggttgagcaggaatatcgtgatcagggtaaagatccggcaacgcttgactacgtggtgccgttcaaagtattcgaaggtaaccgcccgaccaactccatcctgctgcgtgaaatcactccgttcagcctgggtgcgttgattgcgctgtatgagcacaaaatctttactcagggcgtgatcctgaacatcttcaccttcgaccagtggggcgtggaactgggtaaacagctggcgaaccgtattctgccagagctgaaagatgataaagaaatcagcagccacgatagcagcaccaatggtctgattaaccgctataaagcgtggcgcggttaatcatcgtcgatatgtaggccggataaggcgttcacgccgcatccggcaaccgatgcctgatgcgacgcggtcgcgtcttatcaggcctacaggtcgatgccgatatgtacatcgtattcggcaattaatacatagcacgattgattaaataaccttaataacaatgccgacgttatgtcggcatttttttatcagataaatccccttgtctgtaatttaacggaaatcataccgtgaggttaatcctaaaatagatttttaatcgttgtttatttcggaaaatacgcagattaattgcttttgtttttattttaagtttatgatttttattgttatttaaatataagttgaaacttatatttgatattcattccaattatcctaaaacgccatcgctaattccccgcgccgtaattcgcatgctttagttgtgtatactcgatcccgcccgaaatgtttttgggtaaatctccattcattcaatgaagggaaattgttatgaaaaaagttctgtatggcatttttgccatatctgcgcttgcggcgacttctgcgtgggctgcacctgtacaggtgggcgaagcggcagggagcgcagcaacgagcgttagcgcggggagttcctccgcgaccagcgtcagcaccgtaagcagcgcggtgggtgtcgcgcttgcggcaaccggtggcggtgatggttctaataccgggaccaccacaaccacgaccaccagtacccagtaataaagtatgtatccccaaaataattcgagtcattgcatctgtggctagaagtatgaagggattaaccataaccacactccggtgtggttattctgcccctctggagaagagtcgtgaagcgacctgcactcattcttatctgcctgttattacaggcctgtagtgccacgactaaagagctgggcaatagtctgtgggacagtctgttcggcacgccaggcgtacagctgacggatgatgatattcaaaatatgccctacgccagccagtacatgcagcttaatggcgggccgcagttatttgtggtgctggccttcgctgaagacggacaacaaaaatgggtcactcaggatcaggctactctcgttacccaacatggccgtctggtgaagactctgctcggcggcgacaacctgattgaagtgaataaccttgctgccgacccgctgattaaacccgcacaaatcgttgatggcgcaagctggacgcgcacgatgggctggaccgagtaccagcaggtacgctacgccaccgcacgcagtgtcttcaaatgggatggcaccgataccgtcaaagtcggcagcgatgaaaccccggttcgcgtgctggacgaagaagtctccaccgaccaggcgcgctggcataaccgctattggatcgacagcgaagggcaaattcgccagagcgaacagtatctcggcgcggattattttccggtgaaaaccactctcatcaaggcggcaaaacaatgattaaacaaactattgtcgcgttgcttttgagtgtgggagcgagtagcgtcttcgcggcaggaaccgtcaaggtgttcagcaatggcagcagtgaggccaaaacgctaacgggcgcagagcatttaatcgatctggtaggccaaccgcggctggcaaacagctggtggcccggtgcggtgattagcgaagagctggcaacggcggcagcattgcgtcagcagcaggcgttgctgacacggctggcagaacagggcgcagattccagcgccgacgatgccgctgcgattaacgccttacgccagcaaattcaggcgttgaaagtgacgggcaggcaaaaaatcaatcttgatcccgatatcgtccgcgttgccgaacgcggtaacccgccgttgcagggcaactacacgctgtgggtcggaccaccgccgtccacggtcacgttgttcgggcttatcagccgtcctggcaagcagccattcactccaggtcgcgacgtggcgagctatctctctgaccagagcctgctcagcggtgcggatcgcagctacgcgtgggtggtttacccggacggacgcacgcaaaaagcgccggtggcttactggaacaagcgtcacgtagagccgatgcccggcagcattatttatgttggcctcgcggactccgtctggagtgagacgcctgatgcccttaacgccgacattcttcagactctgacgcagcggatacctcaataatgaaaaaaagacatctgcttagcttactggcgctgggcattagcacagcttgctacggcgaaacatatcctgcgcccattggtccgagccagagcgatttcggtggcgtaggattattacaaacgcccaccgcgcgtatggcacgggaaggggagttgagtctgaactatcgcgataacgatcagtaccgttattacagtgctagtgtgcaactcttcccgtggctggaaacaacgctgcgctacaccgacgtgcgcacccggcagtacagcagcgtcgaagcgttctctggcgatcaaacgtataaagataaagccttcgatctcaaactgcgtttgtgggaagagagttactggctgccgcaagtggcggttggtgcgcgggatatcggcggtacggggctgtttgatgcggaatatcttgttgccagcaaagcctgggggccgttcgattttacgctcggcctgggctgggggtatttgggcaccagcggtaatgtgaaaaatccgctctgtagtgccagtgataaatattgctatcgcgataacagctacaaacaggcgggatctatcgacggtagccagatgttccacggtcctgccagtctgtttggcggcgtggaataccagacgccctggcaaccgctgcgcctgaaactggagtatgaaggcaataattatcagcaggattttgccgggaagctggagcaaaaaagtaagtttaacgtcggtgcgatttatcgcgttaccgattgggccgacgttaaccttagctatgaacgtggcaacacctttatgtttggcgttacgttgcgcaccaactttaacgatctgcgcccgtcttacaacgataacgcccgcccgcaatatcaaccgcagccgcaggatgccattttgcagcatagcgtggtggcgaatcagttaacgctgttgaaatacaatgccggacttgccgatccacagatccaggcgaaaggcgatacgctgtatgttaccggcgagcaggtgaaatatcgtgatagccgcgaagggatcatccgtgcgaatcggatcgtgatgaacgatctgccggatgggatcaaaacgatccgcattacggaaaatcgccttaacatgccgcaggtgacgacggaaaccgatgtcgccagcctgaaaaatcatctcgccggagagccgttgggccacgaaacgacgctggcgcaaaaacgcgtcgagccagtggttccgcagtccaccgagcagggctggtatatcgacaaaagtcgctttgatttccatatcgatccggtgctgaaccagagcgtcggtggcccggaaaacttttacatgtatcagctgggcgtgatgggaacggcagatttgtggctgacggaccatctgctgaccaccggcagcctgtttgcaaatcttgccaacaactacgacaagtttaactacactaatcctccgcaggacagccacttaccgcgcgtgcgtacccatgtgcgcgagtatgtgcagaacgatgtctatgtgaataacctgcaagccaactacttccagcatctgggcaacggcttctacggtcaggtctacggtggttatctcgaaaccatgtttggcggtgcgggggcagaagtgttgtatcgcccgctggacagcaactgggcgtttggtctggatgccaactacgttaaacagcgcgactggcgtagtgcaaaagatatgatgaaattcaccgactacagcgtgaaaaccggacatctgaccgcctactggacgccatctttcgctcaggatgtgttagttaaagccagcgtcgggcagtatctggcaggggataaaggcggcacgctggagatcgccaaacgctttgatagcggcgtggtggtgggtggctatgccacgatcactaatgttagcaaagaggagtacggcgaaggggacttcaccaaaggcgtgtatgtcagcgtaccgttggatctcttcagctctggcccgacacgcagccgtgcggcgattggctggacgccgctgacgcgtgacggtggtcagcaacttgggcgtaagttccagttgtatgacatgaccagcgaccgtagcgtcaatttccgctaagtcatgggaaaggtgccagttttcgcactcactggcaccttcattcttaatggcctgtcgagccatcaggaacgcagttcactcccggtttgcgatctggtgtgtaaaggcgaaaacattctgtcttcctgtccgtcgatatcggttgcaggtctggttgcctgagcgactgggccatcattgggctggagacattgctttgcggtaggtcggctttatcagcagtaccgagcggaccagcataagcaggaagaacagagactgataacatcaaagcagcaaaataaggcttcatttttaccacctttatcaggttacgtttcatttgttccagaggaacattgtcgatttttcgcgcattgctggtggctgggaatcacctgaatgggtgatttttgaattaccggctttggtgcggtttgtcttgccggatgcgccgccaggcgcggcttatccggcctacgggtaggtatatccggctttggtggaggcgcgctccaaatccaggttgaacaaaacatacacaaaaaatatagatctccgtcacatttttgcgttatacaggaagctcgccactgtgaaggaggtactgctatgacgagtctctctcgtccgcgcgtggagtttatctccaccattttgcagaccgtactcaatcttggcctgctgtgcctcggcctgattttggttgtcttcctcggcaaagaaacggtgcatctggctgatgtgctgttcgcgccagaacaaaccagcaaatatgagctggtagaaggactggtggtttactttctctatttcgaatttatcgcgctgattgtgaagtactttcagtccggttttcacttcccgctacgttactttgtctatattgggatcaccgccattgtgcgcttgatcatcgtcgatcataaaagcccactggatgtgttgatctacagcgctgcgatcctgttactggtgatcaccctgtggctgtgtaatagcaaacggctgaagcgggagtaaaaagtcagcacgccgaaatggcgcggcgtgctggacaggaagattacagcgtagcagtttgttgtgttttcttcgtttccggttcccagagcgcttccagctcctcaagggttttacctttggtttccgggacaaatttccacataaacagtgctgccagaacgcccatacaaccgtaaatccagtaggagaaaccgttgtggaaatgggccaccagccaggagtttttgtccatcatcgggaaggtccaggagacgaagtagttcgccagccactgggccgccaccgcgattgccagcgctttaccacgaatagcattcgggaagatttcgctcagcagtacccagcataccggaccccaggacatggcaaaggcggcaacatagaacagcatgctcagtagcgccacaatacccggtgcctgagtgtaaaacgcggtaccgaggctaaacataccgattgccattccgagtgcgccgataatttgcagtggcttacgaccaaatttatccaccgtcataattgccagaacggtgaaggtgaggttgataactccgacaataatggtctgcaacagcgcgatatccgtgctggcccccagcgttttgaacacttccggcgcgtagtacagcaccacattgatgccgacaaattgctggaagatggagagcattacgccgattacaatcacgcccacgccaaacatcagcagacgaccaccggttttgcggccatgatccagggagtgtttaatttcctgtactgcctgagttgcaagcgtgttgcccataattttgcgcaggataccttccgcctgttcttgcttgccgcggctcatcagccagcgaggactttctggcacggtatacagcagcattaagaacagcagtgcagggatacattcgctggcaaacatataacgccagccgtcagtattcagccagctggcatcaccggaacgggcaataaaatagtttacgcagtaaactaaaagttgcccgaaaataatcgcaaactggttaaaagagaccagtttcccgcgaatatgagctggagccagttccgcaatatacattgggctgagcatactggctaaaccaacgccaataccgccaataatgcgataaataacaaattccgggacataacctgccagataaacaggcacagtgttgtccgggtttatagaggtaaaaccaagttctggccaggcagaacctacaccagaaataaaaaacaggacagcagcaatcttaagactatcacgacgaccgaagcggttactgcaataaccaccgagggcaccgccgatgatgcaaccaatcagagcgctggccacgcaaaaccctaacagggagttggcagcggattcacttaagttttgtggagcaacaaagacggtattgagactctcaacagtaccggaaataacggcggtgtcgtagccaaataataaaccacctaatgtagcgactaaggtaatgctaaatatataactggaattatactgggtattcattcagacctgccttagaccattctgatcttttatcagtgcattgatgttggaattgtcaggcagttaaggcaattatcattttttacaatgcgtttacgtaatgtcttttctgtgatcttaattgtgataattatccaaaattgataaaaacaatactattgccgtgactcagagcacgaaagagaattatcgtaagtgggaaaacaaataacgtaaaaataataagctctatgatggaaatattaaccggcgaacgattcagattgcagacgaaagaaaaaaaggcgctccgtggagcgccgaataacagtcacaagttgggataacgtaagttgagggtgcagcggcataacattggcagaacaacatctttaacctttcacaccacctgccgtcaggccgttgaccagccagcgttgagccagcaagaagacgatggtgatcggtaatgcagacatcacggcagcggcggcaaagtcaccccacaggtagttttgcgggttgaggtattgctgcatccccacggccagggtgtagctgtttacgtcacgcagtaacaggctcgcgaccggaacttcagtaatggcagcgataaagctcaggatgaataccaccgccagaatcggtacactcagcggcaacaggacaaggcggaaggcctgccacggtgtcgcaccatccagcgcagcagcttcttccaggctactgtcgatggtttcgaaatagcctttgatggtccagacatgcagcgcaatcccacccagatacgcgaaaattacgccgccgtgagtattcaggccaatgaatggaatgtactcacccagacgatcaaacaacgcatacaacgcgaccagactaagtactgccgggaacatctggaaaatcagcattcctttcagcagcgtcgctttgcctggaaagcgcatacgggcgaaagcgtaggcgcaggtggtggagagcgccacaatgccaatcgcggaaatcccggcgacctttacgctgttccacagccacagcagtaccgggaatggcggtggcgtaatgcgaccatcagcctgttcaacgctaaaacctaacgccagtttccagtgatcccaggagatttgctccgggatcaggctgccggtcgcaaagtttccctgacgcaggctgatagcgacgaccatcagcagcgggaacataatcgctgcgataaaaagtagcagtagcaggtgagtaataaataaacgagctttttggcttttcggttggaccattgccatttttgttatctcccttaatcaaacttcattcgcgtggctttcaggttcactatcgccagcgcacccaccagcaggaagatcagcgtggcaattgctgccgccagaccgaagtcctgacccccgccgccttcaaaagcgatgcggtaggtgtagttaacaagcaggtcggtataaccggctggcgtggtcgtgccaagacgatccgggccgccgttggttaacagttgaatcagcacgaagttgttaaagttaaaggcgaagctggcgatcatcagcggcgtcagcggtttaatcagcagcggcagcgtaatcttaaagaagttctggaacggacctgcgccatccattgcactggcttcatacaaatcgtccggaatcgctttcagcaagcccatgcagaggatcatcatgtacggataacccagccaggtattgacgataattagcatcgtgcgggcggtggtcggatcgctgaaccaggcgggcttcacgccaaacagcgcgctcaacatcatgttgatttcaccgaagctctggttaaacaaccctttgaaaatcaagatactaatgaagcttggcaccgcgtagggcagaatcagcaggacgcgatagaccgctttgccgcgcaacgcttcccactgcaccagacacgccagaaccatgccgaccgccaccgttaaaaagacagtgatcaggctgaacaccacggtccagacgaaaatggcgaggaacggtttctgaatgccttcgtcggtaaagacgcgggtaaagtttttccagccggtggtcacggtgtaaccggggcttagcttttcatcaccccagttgccgtcggcggtaatggactggtaaaagccaatttggttattcggacgatatttcacgccgctctgattattcgtcaacgtgccgtcaccgtcgagtgtgtagagcggctgcgtgccagaaaactggcgcagggagctcatcatcactttgttgccatccggcagaatggcggtaatgtcactcagcgcctgacgattctgggtaatcacgcgcagattcgcgcgttcgccttcgggctgggcggtcgtttctttcagttgcagtttttgctcgccgccaaatttaaaagcgtcggagaggtaatttttgccggtttcgccgtcgctgagcgccagttgccactcatcgcccgccgggtaaagaccaaagttataggttttgcctgcttgccaggagcgatctaacaacacttcctgcgcacgttcaaaagtcagctggttagtgctgctgtagttggtgaaggcaatggcgatggtgcagaccagagggaagaggacgaataatcccattccagccattcccgggtaaacatagcgccaggcgtaggctttacgattggcgaaaatatacagccccgcactactcaatatcagcgtggtaatggcgaacaggtattccccttgtgcgtacattaaaacaacaaggtaacccaccagcaggccgagcagacctagcacactccatttcagcgcgtcgctttgccaccaatgtttctttttaatgacatccatggggttcttcctcattccaggacggataaggctttcacgccttatccgacaacaactgcctgatgcgacgctgacgcgtcttatcaggcctacatacgtttcggttttgtaggccggacaaggcgttcacgccgcatccggcatttcacagcattacttggtgatacgagtctgcgcgtctttcagggcttcatcgacagtctgacgaccgctggcggcgttgatcaccgcagtacgcacggcataccagaaagcggacatctgcgggatgttcggcatgatttcacctttctgggcgttttccatggtggcggcaatacgtggatctttcgccaactcttcctcgtaagacttcagcgctacggcacccagcggtttgtctttattaaccgcttccagaccttcatcagtcagcagatagttttcgaggaactctttcgccagctctttgttcggactggcggcgttaatacctgcgctcagcacgccaacgaacggtttggatggttgacccttgaaggtcggcagtaccgttacaccataattcactttgctggtgtcgatgttggaccatgcccacgggccgttgatggtcatcgctgtttcgcctttattaaaggcagcttctgcgatggagtaatcggtgtctgcattcatgtgtttgtttttaatcaggtcaaccaggaaggtcagacccgctttcgcgccagcgttatccacgcccacgtctttaatgtcgtacttgccgttttcatacttgaacgcataacccccgtcagcagcaatcagcggccaggtgaagtacggttcttgcaggttgaacatcagcgcgctcttacctttcgctttcagttctttatccagcgccgggatctcttcccaggtttttggcgggttcggcagcagatctttgttataaatcaggcttaacgcttcaacagcgatcgggtaagcaatcagcttgccgttgtaacgtacggcatcccaggtaaacggatacagcttgtcctggaacgctttgtccggggtgatttcagccaacaggccagattgagcgtagccaccaaagcggtcgtgtgcccagaagataatgtcagggccatcgccagttgccgcaacctgtgggaatttctcttccagtttatccggatgctcaacggtgactttaattccggtatctttctcgaatttcttaccgacttcagcgagaccgttatagcctttatcgccgttaatccagattaccagtttaccttcttcgattttggcgagagcgctggcggaaaacatcatcgtcgttaatgcggataatgcgaggatgcgtgcacctgtttttattttcataatctatggtccttgttggtgaagtgctcgtgaaaacacctaaacggactctagtttctttatacggcaacctctttccatcctccttgcccctacgccccaccgtcgctttgtgtgatctctgttacagaattggcggtaatgtggagatgcgcacataaaatcgccacgatttttgcaagcaacatcacgaaattccttacatgacctcggtttagttcacagaagccgtgttctcatcctcccgcctcctcccccataaaaaagccagggggtggaggatttaagccatctcctgatgacgcatagtcagcccatcatgaatgttgctgtcgatgacaggttgttacaaagggagaagggcatggcgagcgtacagctgcaaaatgtaacgaaagcctggggcgaggtcgtggtaagcaaagatatcaatctcgatatccatgaaggtgaattcgtggtgtttgtcggaccgtctggctgcggtaaaagcactttactgcgcatgattgccgggcttgagacgatcaccagcggcgacctgttcatcggtgagaaacggatgaatgacactccgccagcagaacgcggcgttggtatggtgtttcagtcttacgcgctctatccccacctgagtgtagcagaaaacatgagttttggcctgaaactggctggcgcaaaaaaagaggtgattaaccaacgcgttaaccaggtggcggaagtgctacaactggcgcatttgctggatcgcaaaccgaaagcgctctccggtggtcagcgtcagcgtgtggcgattggccgtacgctggtggccgagccaagcgtatttttgctcgatgaaccgctctccaacctcgatgctgcactgcgtgtgcaaatgcgtatcgaaatctcccgtctgcataaacgcctgggccgcacaatgatttacgtcacccacgatcaggtcgaagcgatgacgctggccgacaaaatcgtggtgctggacgccggtcgcgtggcgcaggttgggaaaccgctggagctgtaccactatccggcagaccgttttgtcgccggatttatcggtagcccaaagatgaacttcctgccggtaaaagtgaccgccaccgcaatcgatcaagtgcaggtggagctgccgatgccaaatcgtcagcaagtctggctgccagttgaaagccgtgatgtccaggttggagccaatatgagcctgggtattcgcccggaacatctactgccgagtgatatcgctgacgtcatccttgagggtgaagttcaggtcgtcgagcaactcggcaacgaaactcaaatccatatccagatcccttccattcgtcaaaacctggtgtaccgccagaacgacgtggtgttggtagaagaaggtgccacattcgctatcggcctgccgccagagcgttgccatctgttccgtgaggatggcactgcatgtcgtcgactgcataaggagccgggcgtttaagcaccccacaaaacacacaaagcctgtcacaggtgatgtgaaaaaagaaaagcaatgactcaggagatagaatgatgattactctgcgcaaacttcctctggcggttgccgtcgcagcgggcgtaatgtctgctcaggcaatggctgttgatttccacggctatgcacgttccggtattggttggacaggtagcggcggtgaacaacagtgtttccagactaccggtgctcaaagtaaataccgtcttggcaacgaatgtgaaacttatgctgaattaaaattgggtcaggaagtgtggaaagagggcgataagagcttctatttcgacactaacgtggcctattccgtcgcacaacagaatgactgggaagctaccgatccggccttccgtgaagcaaacgtgcagggtaaaaacctgatcgaatggctgccaggctccaccatctgggcaggtaagcgcttctaccaacgtcatgacgttcatatgatcgacttctactactgggatatttctggtcctggtgccggtctggaaaacatcgatgttggcttcggtaaactctctctggcagcaacccgctcctctgaagctggtggttcttcctctttcgccagcaacaatatttatgactataccaacgaaaccgcgaacgacgttttcgatgtgcgtttagcgcagatggaaatcaacccgggcggcacattagaactgggtgtcgactacggtcgtgccaacttgcgtgataactatcgtctggttgatggcgcaagcaaagacggctggttattcactgctgaacatactcagagtgtcctgaagggctttaacaagtttgttgttcagtacgctactgacagcatgaccagccagggtaaagggctgagccagggttctggcgttgcatttgataacgaaaaatttgcctacaatatcaacaacaacggtcacatgctgcgtatcctcgaccacggtgcgatctccatgggcgacaactgggacatgatgtacgtgggtatgtaccaggatatcaactgggataacgacaacggcaccaagtggtggaccgtcggtattcgcccgatgtacaagtggacgccaatcatgagcaccgtgatggaaatcggctacgacaacgtcgaatcccagcgcaccggcgacaagaacaatcagtacaaaattaccctcgcacaacaatggcaggctggcgacagcatctggagtcgcccggctattcgtgtcttcgcaacctacgccaagtgggatgagaaatggggttacgactacaccggtaacgctgataacaacgcgaacttcggcaaagccgttcctgctgatttcaacggcggcagcttcggtcgtggcgacagcgacgagtggaccttcggtgcccagatggaaatctggtggtaatagcaaaacctgggccggataaggcgtttacgccgcattcggcaaccaacgcctgatgcgacgcttgcgcgtcttatcaggcctacaacggctgtcaaatgtaggccggataaggcgtttacgccgcatccggcataaaaacaggttgtcattatctgaaaggggcgaaagcccctctgattatcgggtttagcgcgctattgcctggctaccgctgagctccagattttgaggtgaaaacaatgaaaatgaataaaagtctcatcgtcctctgtttaagtgcagggttactggcaagcgcgcctggaattagccttgccgatgttaactacgtaccgcaaaacaccagcgacgcgccagccattccatctgctgcgctgcaacaactcacctggacaccggtcgatcaatctaaaacccagaccacccaactggcgaccggcggccaacaactgaacgttcccggcatcagtggtccggttgctgcgtacagcgtcccggcaaacattggcgaactgaccctgacgctgaccagcgaagtgaacaaacaaaccagcgtttttgcgccgaacgtgctgattcttgatcagaacatgaccccaagtgccttcttccccagcagttatttcacctaccaggaaccaggcgtgatgagtgcagatcggctggaaggcgttatgcgcctgacaccggcgttggggcagcaaaaactttatgttctggtctttaccacggaaaaagatctccagcagacgacccaactgctcgacccggctaaagcctatgccaagggcgtcggtaacagcatcccggatatccccgatccggttgctcgtcataccaccgatggcttactgaaactgaaagtgaaaacgaactccagctccagcgtgttggtaggacctttatttggttcttccgctccagctccggttacggtaggtaacacggcggcaccagctgtggctgcacccgctccggcaccggtgaagaaaagcgagccgatgctcaacgacacggaaagttattttaataccgcgatcaaaaacgctgtcgcgaaaggtgatgttgataaggcgttaaaactgcttgatgaagctgaacgcctgggaagcacatctgcccgttccacctttatcagcagtgtaaaaggcaaggggtaattacgccccacagtgctgattttgcaacaactggtgcgtctcctggcgcacctttttttatgcttccttcctgggatatgagcgattttttatagtaactcacttcttcttcactaagaatatccattatctcaatgccttatcagagattcttttcctttcgccggtagtgtctggacattcaggctacttttccaggttattttatttctgttatgcagaggttttatgataagtcatatcctaaattctggcggcaataactctttgatgaaacatgatgtggtgcaaggaaataatatagtagatcttgatttactacgtaatttaaatggggtgccaggtttaaacagagataactttatttatatcagcaatattttttcaaatataaaacaacggaacgaaaaaatcatgcaataaatatgtttcgtgaagtctcaatcagtaatgatactataagtgtaaaattctacagaaatgaaaaaaattgaatgcgcttgcaattttctgatggataaagatgcgcaggggtatatcgacctgtctgatttggatttaacaagttgtcattttaaaggtgacgttataagcaaggtgtcttttttaagtagtaatctacaacatgtaacattcgaatgtaaagaaattggggattgcaattttactactgcaatagttgataatgtcatatttagatgtcgacgtttacacaatgtgatttttatcaaagcgagtggtgaatgtgtcgatttcagcaaaaatattcttgatacagttgacttcagccagagtcaacttggtcatagtaattttcgcgaatgtcagattagaaatagtaacttcgataattgttatctttacgctagccacttcaccagagcagagtttctgtctgccaaagaaataagttttattaaaagcaatttgacagctgttatgtttgattatgtgcgaatgagcacagggaattttaaagattgcattacagaacaattggaattaactattgattatagtgatatattttggaatgaagatctcgatggttatatcaataacattataaaaatgattgatacattgccagataatgcaatgatattgaaatccgttctggccgtaaaactggtgatgcaattaaaaatacttaatattgttaataaaaactttattgagaatatgaagaaaatatttagccattgtccttatataaaagatcccattatacgcagttatatccattctgatgaagataacaagttcgatgattttatgcgtcaacatcgattcagtgaggtgaatttcgatacccaacagatgatcgattttattaacagatttaatacgaataaatggctaattgataaaaataacaatttttttatccaacttatcgatcaggccttacgaagtacggatgatatgatcaaagcaaatgtttggcatctttataaagagtggattcgtagtgatgatgttagtcctatatttatagaaactgaagataatttaagaacctttaacacgaatgaattaacacgaaacgataatatctttatcctgttctccagtgtcgatgatgggccagttatggtggtaagctcccagcgcttacatgatatgttgaatcctacaaaagataccaattggaattccacgtatatctacaaatccagacatgagatgttgcctgttaatcttactcaggaaacacttttcagctccaaatctcatggtaaatatgcgcttttccccatttttactgcgagttggcgagctcatcgtataatgaataagggtgtttaagtaaaggaaaacatcaccgttcctggcatcctggacggtgatgcccctacggttgccctcgccagcacgggcatcggtaaagcgtaaggttcaacatcgttttaccacttcatgcgattgttgcgtttttgttgcgtattagatcacttaatttgctttacatctcccgtaaacacttttctgcgatacaatgcctttacgttatgtaacggagagttcggcatgagtcaccccgcgttaacgcaactgcgtgcgctgcgctattgtaaagagatccctgccctggatccgcaactgctcgactggctgttgctggaggattccatgacaaaacgttttgaacagcagggaaaaacggtaagcgtgacgatgatccgcgaagggtttgtcgagcagaatgaaatccccgaagaactgccgctgctgccgaaagagtctcgttactggttacgtgaaattttgttatgtgccgatggtgaaccgtggcttgccggtcgtaccgtcgttcctgtgagtacgttaagcgggccggagctggcgttacaaaaattgggtaaaacgccgttaggacgctatctgttcacaagtagcacattaacccgggactttattgagataggccgtgatgccgggctgtgggggcgacgttcccgcctgcgattaagcggtaaaccgctgttgctaacagaactgtttttaccggcgagtccgttgtactaagaggaaaaaaatatggagtggagtctgacgcagaataagctgctggcgtttcatcgcttaatgcgtacggataagccaattggcgcgttactgctgctctggccaacattatgggcgttgtgggtggcgacaccgggcgttccccagctctggatcctggcggtgtttgtcgcgggtgtctggctgatgcgcgctgccggatgtgtggtgaatgattatgctgaccgcaagtttgatggtcatgttaagcgcacggcgaaccgaccacttcccagcggcgcggtaacagagaaagaggcgcgcgcgctgtttgtcgtgctggtactgattagctttttactggtgctgacgctgaatacgatgaccattctgttgagcattgccgcgctagcgctggcgtgggtgtacccgtttatgaagcggtatacccatctaccgcaagtggtgctgggcgcggcgtttggctggagcattccaatggcttttgccgctgtgagtgagagcgtgccattgagttgctggttaatgttcctcgccaatattctctgggcggtggcttacgacacgcagtatgcgatggttgaccgcgatgatgatgtgaagattggcattaaatccacggcaatcctgttcggccaatacgataaattgattattggtattttgcagattggcgtactggcactgatggcgatcatcggtgagttaaatggcttaggctggggatattactggagtattctggtggctggcgcgctgtttgtttatcaacaaaaactgattgccaaccgcgagcgtgaagcctgctttaaagcatttatgaataataactatgttggtctggtactatttttagggctggcaatgagttactggcatttctgatgatgtaaaaaagccggatgatcatccggctttcttctgggttgcctgatgcgcggcgcttctcaggcctacacaacacatcgcaatttattgaatttgcagattatggaaggccggataaggcgttttcgccgcatccggcaattctctctgattacccttcgccctgcgtcgcactctcaatcgtcaaacgcacgtcacttgtaatcaactccgccagcaactgataaaccttcatcgtttctgccggttcggcatcgccgctatcgctgatatacccttcatcacgcagtgtcagcaccagagaactgaacaccgccttgtcgaagaactccggcgcgttgatgccgtgcagcacggagagacgttgcgcgacggtgcggctctctttctccagcgtaccgcggttgatgctcgggttggcactcaacaaccagaaggtgatggcataacgttgcagcgtttcgcgcgcgcctgcggccagcagctgtagcgtgcgagaatgcgccgggttgatatgcaactcatcatcttgcagggtaatcagcccctgacgttgcatctcatttgccagcgcatcaataacgtccggcaactcgtcgcgatcccagcgcaggaacagctccgctttcagcattgggtaaagcacattgacgtgctccatcaatacgtcgcgggagatgtggcgatgctgggtgacgattgccgccatcaggctaggcagcaccaacatatgcgcaatgttgttgcgatagtaggtcatcagcaccgcttgctcgcgcggcagaatgatgatgtcgccgattgtgtctttctcgacttcaaacttgttcatttgcagcgcgtgatcgataagctcgctggcgctggcactaggaacggtagagtccgtggagtagggcacgttgcgcatcagatccaggtagcagttgagttgctcggttaactgctcgcgggtgagactgcgctgacgacttgccagtagcgcagtacagcacaggttcatggcgtttgccgcgcctgcgttgttaatgcgtaccatcagatcggcagcaatattattgaccgtcggcgttaaccatgccggacgcaccgcttcgatgggatcgatagattcacgccagtcaggtacatgctggttaaggtaggtcatcaacggcattggttcaccgaagttgacgtaaccctgaccgagattacgcagcttgcttaaaccgcgcagcatctgcggcaggctctctttctctttcgtcgcgccgcgcagttctttggcgtaagtacccacttccatgacgtgctcataaccgatatagatcggaatcagcgtaatcggacgcgtgccgccacgcagcatcgcctgaatggtcatgctcagcgtaccagttttcggatccagcaaacgccccgtacgggaacgaccgccttccacgaagtactcgacggaataaccacggctgaacagttcgccgagatactcccggaaaacggtggaataaagtttattgcctttaaacgtacggcgaataaagaacgcccccagacggcggaaaatcggcccggcaggccagaaattcaggttgatcccggcggcgatatgcggcggcaccagcccctggtgatacagcacgtaagaaagcagcaggtagtccatgtgactgcggtggcaaggcacatataccagctcatgaccgtcgtgggccagctggcgaacgcgctcagcgttatggacgttgatgccctggtaaagtcggttccaggtgaagcccagaatacggtcagtcaggcgaatcatctcgtaagagaaattcgccgcaatctcttccatcagtgcaatcgcgttctgctgcgctttttcatgggagatttttttgctgcgcgcttcatcttctaccgctttggcaatggcgcgggaggcgagcagcttattaaacagatcctgacgagcaggcaaacgtgggcctacggcagccagacgttgacgggcaaagtgcatacgcgccacgcgcgccagtttctgagcgatagttttatccgtgccgtgttcatccgccatacggcgcaggctaacactcgggctgaaacgcacaaaactgtcgcgaccgagccacagtacagcgaaaaatttctgtacgccgttaagcatacgcagcggcgggttcacttcgcctttttcacgccccggcgcgcgaccaaacatcacgctcactggcaccatctgcacatccagatttgggttgctacggtgcaaatcgagatagtcgtggaacagcttaatagactcttctttcggcgtgtaataggtgaacacacgcggcccgccgtgaatgaacacatagcgcggcagtagcgtgccgtcgatttccagcggctctaacgggtcaggcaagtcatgtgccagacactgggcgcgcaacgtcagcaaatctgctttgctgttgtacggtaaaacgtacataattggacgagaggtatccagccccagttccggggcaggatctgccggaatagacttgctttttaccaggatgcttaatggtaaattcagtaatttgtagtaaattcgtggccagccggacataaacgatgtaaagcctctggttaataatgcaaatgcgcggcaaggatagcagaaagtcatgggaaattctgtggtatccgctcatgtttcgcgcggcgctacgcaaacccgaatcatcggatttaacggtacactgatattgacgctcataatgtaaaaaggttctttcaatggccaataataccactggattcacccgaattatcaaagctgctggctattcctggaaaggtttacgcgctgcatggatcaacgaagcggcattccgtcaggaaggcgtagcggtattgttggcggtggtcatcgcctgctggctggatgtggacgcgattacccgcgtgctgcttatcagctccgtgatgctggtgatgattgtggaaatcctcaatagcgccatcgaagcagtggttgaccgaattggctctgaataccatgagctttccggacgcgcaaaagatatgggatccgctgcggtgctgattgccattatcgtcgccgtgattacctggtgcattctgttatggagccattttggataacccttccagaattcgataaatctctggtttattgtgcagtttatggttccaaaatcgccttttgctgtatatactcacagcataactgtatatacacccagggggcggaatgaaagcgttaacggccaggcaacaagaggtgtttgatctcatccgtgatcacatcagccagacaggtatgccgccgacgcgtgcggaaatcgcgcagcgtttggggttccgttccccaaacgcggctgaagaacatctgaaggcgctggcacgcaaaggcgttattgaaattgtttccggcgcaagtcgcgggattcgtctgttgcaggaagaggaagaagggttgccgctggtaggtcgtgtggctgccggtgaaccacttctggcgcaacagcatattgaaggtcattatcaggtcgatccttccttattcaagccgaatgctgatttcctgctgcgcgtcagcgggatgagcatgaaagatatcggcattatggatggtgacttgctggcagtgcataaaactcaggatgtacgtaacggtcaggtcgttgtcgcacgtattgatgacgaagttaccgttaagcgcctgaaaaaacagggcaataaagtcgaactgttgccagaaaatagcgagtttaaaccaattgtcgttgaccttcgtcagcagagcttcaccattgaagggctggcggttggggttattcgcaacggcgactggctgtaacatatctctgagaccgcgatgccgcctggcgtcgcggtttgttttagttctctcttcatcaggcttgtctgcatggcattcctcactagttctgataaagcactctggcatctcgccttacccatgattttctccaatatcaccgttccgttgctgggactggtcgatacggcggtaattggtcatcttgatagcccggtttatttgggcggcgtggcggttggtgcaacggcgaccagctttctctttatgctgttgctgtttttacgcatgagcaccaccgggctgactgcgcaggcttatggtgccaaaaatcctcaggcattagcccgtacgctggtgcaaccgttgctgttggcgttgggggctggggcgttaattgcgctgctgcgtacgccgattatcgatctggcgctgcatattgttggcggtagtgaggcagtcctggaacaggcgcggcgctttcttgaaatccgctggttaagcgcaccggcgagcctggcgaatctggtattactcggttggttactcggcgtgcaatatgcccgtgcgccagtaattttgttagtggtcggcaatatcctcaacattgtgctggatgtctggctggtgatggggctgcatatgaacgtgcagggcgcggcgctggcgacggttattgcggaatatgcaacattgctgattggtctgctaatggtgcgtaaaatcctcaaactacgcggaatttccggcgaaatgctgaaaactgcctggcgaggaaacttccgtcgcttgctggcgcttaaccgcgatatcatgctgcgtagcctgttgttgcaactctgtttcggcgcgatcaccgtacttggcgcgcgactggggagtgacattatcgctgttaacgcggttctgatgacgctactcacctttaccgcctatgcgctggatggttttgcctacgcggttgaagcgcactccggtcaggcatacggtgcgcgcgacggtagccagttgctggatgtctggcgggcagcgtgccgccagagcgggatcgtagcgttactgtttagcgtggtttatttgctggctggggaacacatcattgcgttactgacgagcttaacccagattcagcagctggctgaccgctatcttatctggcaggtgattttgccggtggttggcgtctggtgttatctgctggacggcatgtttataggcgcaacgcgtgccaccgaaatgcgtaacagtatggcggtggccgccgcaggttttgcgctgacgctccttacgctgccgtggctgggtaatcatgctttgtggctggcattaaccgtctttctggcgttgcgcgggctttctctggcggctatctggcggcgtcactggcgcaatggtacctggtttgccgcaacgtgacggttaaaaattctgaataaataatcctaagccaaattgctgactacacttaatctcacgttcagaagaaaagtgaacgtactctcattcacaacctaacgatgaggtcttgattatgaataaagatgaagccggcggtaactggaaacagtttaaaggtaaagtgaaagagcaatggggcaaactgaccgatgatgatatgacgatcattgaaggtaaacgtgatcaactggtcggtaaaatccaggaacgttatggttatcagaaagatcaggcagaaaaagaggtcgtggattgggaaacccgcaatgaatatcgctggtaattaatccctcctgcccgacgtgtacaaggatgtacgccctcttaacgcggtttctttttcacctgcacagagtgatcatgctggcactgttcaggatgacgacacgcttccacttctacacatgccgcacagagcccatgtgcttcaatcacattatgccgcagggcaaaccccatttttgccgccagcgtatgcataatgtcttccacgccttctgcacactcttctttcactgcgccgcagcgatcgcaaataaacatggcactcgtatgggtgggctgatcgaacagatgacagagcacataactgttggtggattccaccttatgcacaaaaccttgctcaagcagaaaatccagcgcgcgataaaccgttggcggcttggcttgcggttcagcttcgcgcagtaaatcaagcagatcataagcgctgatagcgccatcctgcagactcatcaggcgcaacacttccaggcgctgtggggtcaggcgcacattacgctgcgcgcagattttttcagcctgcgctaataactcctgcgttgtggtcttttccatcgggcacctcaaagtgggggttaagaatgtccttactttaccatgttccaggaaaaacaccgagaacccttattgttgccgtaatgttgattttctgctttgtaggtaaggtgttatgttgccttgtcgtaccattatcaacacgataataattaataattcatttttaaataaattgcttcaagttaactcgctatttatttaactgggtttaaacgcatacctgtagttcagaaattatgagcgatttttgatagtgaccagatggcaaaagaattataaggaggacacggtacgacaaaaaaggtagatgaatcatgttgaagataatacccggtgcaactggatactttaataaaacactcaatagtaatcaattcgataatgaagatgcaatcaaagataaattagataatagaggtagtatcaaaggtaaattaaataatatatatggtaaatctattgattatgcagcgctgcgtcatcgggatataattattgcaaaaatagatttgtttattcaacgaatcacgcataatttatggcatgcacgtaaaaaaatgtgtttttaattgtgcaaataaatgatctcaaaatgtgggtcaataagtatattgacgattgcactgatgaggatttaaacgatcgtgactttattgcaagtgttgttgaccgggctatttttcatttcgcgattaatagtatatgtaatcctggggataataaagatgcaatgcccattgaacaatgtacttttgatgtagaaactaagaatgaccttccctccacggttcagctattttatgaggaatctaaggataatgaacctttagcgaatatacattttcaagcaataggttctggttttttaacgtttgttaatgcctgccaggaacatgatgacaacagcttaaaattatttgctagcctgttaattagtcttagttattctagtgcctacgcagatttaagtgaaacagtgtatattaatgaaaataatgagagctacctgaaagctcagtttgaaaaattatctcaacgtgatatgaagaagtacctgggagagatgaagcgtctggctgatgggggagaaatgaattttgatggctatctggataagatgagtcatctggtgaatgaaggaacgctcgatcctgatattttaagcaaaatgcgagatgctgcaccacaattaattagcttcgcgaagagctttgacccaaccagtaaggaagagattaaaatacttacagacacttctaaattaatttatgatttgttcggggttaaaagcgagaaataatatgtgaagttcttcgatagtatggaaggcattatataaaaggacccaatatttattgggttcttttttctctatcaatactattagcagggagatatatcaccagagtttaatgtgtgattttttatttatcgtcgaacctggattgtttatcattggccttaacaaagttaacggctaataagattatttccatcacttcgtgagagcttcatgccttgagaggatctcaattttcttttgcaatgagacaggcgcttcctgttgttatggtatagtaccccgctattgagcctcctgaatagtgatgctgaataacataaccccatgatatatcgataaaataatctctacatttgaaaatgcacggtaattctgaaatgcaaaaaatcaaccaaaccagcgcaatgcctgaaaaaactgacgttcactggagtggtcggtttagcgttgcaccaatgctcgactggacggacagacattgccgctatttcttgcgtctgctttcccgcaatacgttgctgtataccgaaatggtgaccacaggggcgattattcacggtaaaggtgattatctggcgtacagtgaagaagaacatccggtagcgttgcaactgggcggtagcgatccggcggcgctggcgcagtgtgcaaagctggcagaagcgcgcggatatgatgagatcaacctgaatgtcggctgcccgtctgaccgggtgcagaacggcatgtttggtgcgtgtctgatgggtaatgcgcagctggttgccgactgcgtgaaagcgatgcgcgatgtggtgagcattccggtgacggtgaaaacgcgtattggcatcgacgaccaggacagctatgaatttctctgcgatttcatcaataccgtttccggcaaaggcgagtgtgagatgttcatcatccacgcacgtaaagcctggcttagcgggttaagcccgaaagaaaaccgtgaaatcccgccgctcgattatccgcgtgtgtatcaactgaagcgtgactttccgcatctgacaatgagcattaacggtggtatcaagagcctggaagaggccaaagcacacctgcaacatatggatggcgtgatggtcgggcgcgaggcgtatcagaatccgggtattctggcggcggtagaccgggagatctttggttccagcgataccgatgccgatccggtggcggtagtgcgcgccatgtatccgtacattgagcgtgaactcagccaggggacgtatctcggccatattacccggcatatgttgggcttgttccagggtattcctggcgcgcggcagtggcggcgttatttaagtgaaaatgcccataaagcgggtgcagacattaatgtgctggaacacgcgctcaaactggtggcggataagcgttaacttttcaccaaaaagtagtcaaattcaccacgccctgcgcaccgtcgcggggcgttttgctgttaaatcaatagattatttttggcatgattcttgtaatgccagcaagagatttcatatttgggagagcatcatgctggaactactttttgtgattggcttttttgtcatgctgatggtcaccggcgttagcttgctgggcattatcgccgcgctggttgtggcgacggccattatgttcctcggcggtatgctggcattgatgattaagttgctgccgtggttactactggcgattgcggtggtgtgggttattaaggcgattaaagcaccaaaagtgccgaaatatcagcgttatgaccgctggcgttactaagggattgtgcggatgatcacaacctaaggttttatccttagaacaaaataggaattgataatcaaatctgtcactattgcgcctctaacagattcatcgtgctgtaccctacatacagccgaactataaaaagaaagggcttcccaggtggaagccctatttcttttatggaatcagcaggctggaaccttgcgtcgcccggctttccagaatctcatgcgcacgctgcgcatccttcagcggatatttctgctgctcggcgacatcgaccttaatcacaccgctggcaatcaaagagaacagttcattactggcctcggttaattcctcccgcgtggtgatatagccttgcagggaagggcgtgtcacatacaagctgcctttttgattgagaatgcctaagttcacaccggtaaccgcaccactactgttgccaaaactgaccattaagccgcggcgttgcaggcaatccaggctccgttcccaggtgtctctgcccacggaatcgtacaccacgcgcactttcttaccgccggtgatctcttttaaccgctcgaccagatcctcttcacgatagttaataacctgccacgcgcccgcttttagcgcgctctgcgctttttgcgcggttcctacggtgccgataagtttcgcgcccagggcttttgcccactggcaggcaattaagccaacgccgccagccgctgcgtggaacaggaactgttcatcgggtttaatttcataggttttgcgcagcagataataaaccgttaagcctttcaggaaggatgccgcagcttgctcaaaagaaattgccgcaggcagaatcgccgctttatccgcaataatgttatgcacagagctgtaagcgcctaacgcgctctgcgcatagactacacgatcgcctgccttaatatgctttacaccactgccgactttactcacgatgcctgctgcttcggtgcctaatccgctgggtaggcttggcggcgggtaaaggccgctgcggatatatgtgtcgataaaattgatgccgatggctttattttcgacctggatttcattctccgccggatcggcaggagtgaactctacggcttgaagtacttccgggccaccgtgcttgtgaaattcaattcgtgttgccatgtgtcctccagaacgtatcgtcagggtctgcttcatatgataaagtttcgacccattctttatctcggtaactccattcactatggcaggaaataaacccttcaacaaacagcaggctgaaccccgcgaacgcgatccacaagttgccgggctgaaagtgcctccgcacagcatcgaagcggagcagagcgtgttgggcggtttaatgctagataacgaacgctgggatgatgtagccgagcgtgtggtagcagacgatttttacacccgcccacaccgtcatatctttactgaaatggcgcgtttgcaggaaagcggtagccctatcgatctgattactcttgcggaaagcctggaacgccaggggcaactcgatagcgtcggtggttttgcttatctggcagagctgagtaaaaatacgccaagtgcggctaacatcagtgcctatgcggacatcgtgcgtgaacgtgccgttgtccgtgagatgatcagcgttgcgaatgagattgccgaagctggttttgatccgcaggggcgtaccagcgaagatctgctggatctggctgaatcccgcgtctttaaaattgccgaaagtcgtgcgaacaaagacgaagggccgaagaacatcgccgatgtgctcgacacaaccgtggcgcgtattgagcagttgtttcagcagccacacgatggcgttaccggggtaaacaccggttatgacgatctcaacaaaaaaaccgctggcttgcagccgagcgatttgatcatcgtcgccgcgcgtccgagcatgggtaaaacaacatttgcgatgaacctcgtcgaaaacgcggcgatgttgcaggataaaccggtacttatcttcagcctggagatgccaagtgaacagatcatgatgcgttctctggcgagcctgagccgcgttgaccagactaaaatccgtaccgggcagctcgatgacgaagactgggcgcgcatttccggcaccatgggtattttgctcgaaaaacgcaatatctatatcgatgactcctccggcctgacgccaacggaagtgcgttcccgcgcacgccgtattgcccgtgaacacggcggcatcgggcttatcatgatcgactacctgcaactgatgcgcgtaccggcgctttccgataaccgtacgctggaaattgcagaaatctctcgcagcctgaaagcactggcgaaagaactgaacgtgccggtggtggcgctgtcccagttgaaccgttctctggaacaacgtgccgacaaacgcccggtcaactccgacctgcgtgaatctggctctatcgagcaggatgcggacttgatcatgtttatctatcgtgatgaggtgtatcacgaaaacagtgatttaaaaggcatcgcggaaattattatcggtaaacaacgtaacggcccaatcgggacggtacgcctgacctttaacggtcaatggagccgcttcgacaactatgcggggccgcagtacgacgacgaataataattattttatgaattaggtaattaaagcaaacacttatcaaggaacacaaatgcaagcggcaactgttgtgattaaccgccgcgctctgcgacacaacctgcaacgtcttcgtgaactggcccctgccagtaaaatggttgcggtggtgaaagcgaacgcttatggtcacggtcttcttgagaccgcgcgaacgctccccgatgctgacgcctttggcgtagcccgtctcgaagaagctctgcgactgcgtgcggggggaatcaccaaacctgtactgttactcgaaggcttttttgatgccagagatctgccgacgatttctgcgcaacattttcataccgccgtgcataacgaagaacagctggctgcgctggaagaggctagcctggacgagccggttaccgtctggatgaaactcgataccggtatgcaccgtctgggcgtaaggccggaacaggctgaggcgttttatcatcgcctgacccagtgcaaaaacgttcgtcagccggtgaatatcgtcagccattttgcgcgcgcggatgaaccaaaatgtggcgcaaccgagaaacaactcgctatctttaataccttttgcgaaggcaaacctggtcaacgttccattgccgcgagcggtggcattctgctgtggccacagagccattttgactgggtgcgcccgggcatcattctttatggcgtcagcccgctggaagatcgctccaccggtgccgattttggctgtcagccagtgatgagtctaacctccagcctgattgccgtgcgtgagcataaagccggagagcctgttggttatggtggaacctgggtaagcgaacgtgatacccgtcttggcgtagtcgcgatgggctatggcgatggttatccgcgcgccgcgccgtccggtacgccagtgctggtgaacggtcgcgaagtaccgattgtcgggcgcgtggcgatggatatgatctgcgtagacttaggtccacaggcgcaggacaaagccggggatccggtcattttatggggcgaaggtttgcccgtagaacgtatcgctgaaatgacgaaagtaagcgcttacgaacttattacgcgcctgactagtagggtcgcgatgaaatacgtggattaatcgttctgtaatatttgattgtctgtgccggatgcggcgtgaatgccttatccggccaataaaatcctaaaaattcaataagttgatgttctttcatgctcttataaaggtcgtgcctctggcggatgtacgtttgtcatgagtctcactctgttgctaattgccgttcgctcctgaacatccactcgatcttcgccttcttccggtttattgtgttttaaccacctgcccgtaaacctggagaaccatcgcgtgtttcaaaaagttgacgcctacgctggcgacccgattcttacgcttatggagcgttttaaagaagaccctcgcagcgacaaagtgaatttaagtatcggtctgtactacaacgaagacggaattattccacaactgcaagccgtggcggaggcggaagcgcgcctgaatgcgcagcctcatggcgctagcctttatttaccgatggaagggcttaactgctatcgccatgccattgcgccgctgctgtttggtgcggaccatccggtactgaaacaacagcgcgtagcaaccattcaaacccttggcggctccggggcattgaaagtgggcgcggatttcctgaaacgctacttcccggaaagtggcgtctgggtcagcgatcctacctgggaaaaccacgtagcaatattcgccggggctggattcgaagtgagtacttacccctggtatgacgaagcgactaacggcgtgcgctttaatgacctgttggcgacgctgaaaacattacctgcccgcagtattgtgttgctgcatccatgttgccacaacccaacgggtgccgatctcactaatgatcagtgggatgcggtgattgaaattctcaaagcccgcgagcttattccattcctcgatattgcctatcaaggatttggtgccggtatggaagaggatgcctacgctattcgcgccattgccagcgctggattacccgctctggtgagcaatagcttcagcaaaattttctccctttacggcgagcgcgtcggcggactttctgttatgtgtgaagatgccgaagccgctggccgcgtactggggcaattgaaagcaacagttcgccgcaactactccagcccgccgaattttggtgcgcaggtggtggctgcagtgctgaatgacgaggcattgaaagccagctggctggcggaagtagaagagatgcgtactcgcattctggcaatgcgtcaggaattggtgaaggtattaagcacagagatgccagaacgcaatttcgattatctgcttaatcagcgcggcatgttcagttataccggtttaagtgccgctcaggttgaccgactacgtgaagaatttggtgtctatctcatcgccagcggtcgcatgtgtgtcgccgggttaaatacggcaaatgtacaacgtgtggcaaaggcgtttgctgcggtgatgtaatgcaggaaagcaggctggagctacccagcctgcagtgaaattaaactgtcgtcgctttcactctttctttatagatgatttttttgatgccatcgttctacgtgagagataataaacgttgttagttcttttattgttaagcttatcccaattatctggaattccttatcctgtttttttgggtggagtaataatttctgcacatctaaccattattaaatttaataataagtatcgggtttgttacgatagaatatttctatatcctcaagaatatgctttgccttattgcctgtgactttctgagattcaattatagtatcgttaaattctaatgttaaagagaactcttttttccgctttgtgtaagtttaaccttatattgattaccaatatcaaataaaaaggtcctgtaatgagaataatcacctttaacctcctcggcaaaacagcaaagcgtgcaaatatacataaagtctttcttacccctgattttgttaactaaatcaataaatgcgtgaaaaactttacttgcaatagaacttgatacttcttctccaggtctaaaaaatcttttgcaatttttaactgtgtttctatgtataaaaagaaatctttggcataagagatatctttattatttagtgcatctagctcaacaggtaaagatgtcgttttgttgctattcacatatgatatattcatatcatcatctccatcgcgagtaataaaattaatcaccattgtagggtagggggctggtcaatcagaaatcatctttataaacttcgattgtttttgtaatgctgtatcattaagttcattaaatcgtacagcagataaatgttctatcaaatttcgctcatttgccgaggattcatcataataaacgtaaaattaatgtatccttacatcgagtaataaacattttttatacaaaaaaagacaggaacgtatttactgggttaaatataatcatcctgcttttcatcacaaaaaccgcagataatccttcctttccccggcagctggcgttatggtcagatggtttttgcaacaaatctcacaataaaaagtttcaacatactgactatttagggaaaaatatgcgcaagatcacacaggcaatcagtgccgtttgcttattgttcgctctaaacagttccgctgttgccctggccagttctcctagtccgcttaaccctgggactaacgttgccaggcttgctgaacaggcacccattcattgggttagcgtcgcacaaattgaaaatagcctcgcagggcgtccgccaatggcggtggggtttgatatcgatgacacggtacttttttccagtccgggcttctggcgcggcaaaaaaaccttcagcccagaaagcgaagattatctgaaaaatcctgtgttctgggaaaaaatgaacaatggctgggatgaattcagcattccaaaagaggtcgctcgccagctgattgatatgcatgtacgccgcggtgacgcgatcttctttgtgactggtcgtagcccgacgaaaacagaaacggttagtaaaacgctggcggataattttcatattcctgccaccaacatgaatccggtgatctttgcgggcgataaaccagggcaaaatacaaaaagccaatggctgcaggataaaaatatccgaattttttatggcgattctgataatgatattaccgccgcacgcgatgtcggcgctcgtggtatccgcattctgcgcgcctccaactctacctacaaacccttgccacaagcgggtgcgtttggtgaagaggtgatcgtcaatagtgaatactgacagagcgggagagcgtgatgctctcccgaatgctgtttttttaatcacacctttatcctttcgctgtcttgctgcaaactgattaagagagttttatcaaggagcagcacatgtggtatcaaaagacgctcacgcttagcgccaaatctcgtgggtttcatctggtaacggatgaaattctgaatcagctggctgatatgccgcgcgttaacatcggcttactgcatctgttgctgcaacatacctccgcctctctgacacttaatgagaactgcgatcccaccgtacgccacgacatggagcgttttttcctccgcaccgttcccgacaacggaaattatgagcatgactatgagggagcagacgatatgccttctcatatcaaatccagtatgctgggaacaagccttgtattgccggtgcataaagggcgtattcagaccggcacctggcaaggcatttggctgggggaacatcgcatccacggcggaagccgtcgcatcatcgcgacactacaaggggagtaaaaaatgaccattagcgagttgctacaatattgcatggcaaaaccaggcgcagaacagagcgtgcataatgactggaaagcgacgcagatcaaagtggaagatgtactgtttgcgatggtgaaagaagtagaaaatcgcccagctgttagcctgaaaaccagcccggagctggcggagctgctacgtcagcagcacagcgatgtgcgtccaagccgccatctgaataaagcgcactggagcaccgtgtatctcgacggtagcctgccagatagccaaatctattatctggtggatgcgtcttatcagcaggcggtgaatttactgccggaagaaaaacgtaaattgctggtgcaactctgaaaggaaaaggccgctcagaaagcggccttaacgattacagcatcggcttaaggaagcgtgccgtgtgacttgcttcgcactccgcgacggtttctggcgtaccggagacgaggatctcgccgccaccactgccgccttctggtcccaggtcgacaatccagtcagcggttttgatcacgtcgagattgtgctcaatcaccacaatggtgttgccctgatcgcgcagtttatgcagtacgtcgagcagttgctgaatatcggcgaagtgcagaccggtggtcggctcgtcgagaatatacagcgtctgcccggtgccgcgtttactcagttcacgcgccagcttcacgcgctgggcttcaccgccactaagggtggttgcggactgccccagtcgaatgtacgtcaggccaacgtccatcaacgtttgcagcttacgcgccagtgcaggtacggcatcaaagaactcacgcgcctcttcgatggtcatatccagcacttcgtggatggttttgcctttgtacttaatctccagcgtttcacggttatagcgtttacctttgcactggtcgcacggcacgtagatatccggcaggaagtgcatctccactttgatcacgccatcgccctgacaggcctcgcagcgtccgccacgaacgttaaagctgaaacgtcccggcgtatagccgcgcgcacgggattccggtacgcccgcaaacagttcgcgcacaggcgtaaacacgccggtataggtcgccgggttagaacgtggagtacgaccaattgggctttggtcgatatcgatcactttatcgaaatgctccagcccctgaatatcgcgatacggtgctggttcggcgatggtcgccccattcaactggcgttgggcaatcgggaacagtgtgtcgttaatcagcgtgcttttaccggaaccactaaccccggtgatgcaggtaaacagacccaccggcagcgtcagcgtcacgtccttcaggttgttgccgcgtgcgcctgtcagcttcagcactttttccggattcgccggaacgcgtttcttcggcacttcaatcttgcgtttgccgctcatgtactgcccggtcaagctctccggcaccgccataatcgcttccagcggaccttctgcgaccacttcaccgccgtgaacacctgcgcccgggccaatgtcgatcacatggtcagcggcgcgaattgcgtcttcgtcgtgctccaccacaatcacggtattaccgagatcgcgcagatggataagcgtacccaacaggcgctcgttatcacgctggtgcaggccgatagacggctcgtccagcacgtacataacgccaaccaggcccgcaccaatctggctcgccagacggatacgctgtgcttcaccgccagaaagcgtttctgcgctgcgggaaagcgtcaggtaattcaggccgacgttaacgaggaatttcagacgatcgccgatctctttaaggattttttctgcaatcttcgcccgctgacctgcgagtttgagattgttgaagaattccatcgcatgaccaatgctcatgtcggagatagcaggcagcggcgtattctcgacatacacgtggcgcgcttcccgacgcagacgcgtcccttcgcagctggcgcacggacgattactgataaacttggctaattcttcgcgtaccgcgctggattccgtctctttatagcggcgctccatattatgcagcacgccttcgaacggatgacgacgaatggaggtatcgccacgatcgttcatgtatttgaattcaatgttttctttgccagaaccgtacaacaccactttatgcacgttcgcgctcaggctgccccacggcgcttcgacgtcgaacttatagtgatctgccaggcttttcagcatctggaaataatagaagttgcggcgatcccagccacggatcgcaccaccagccaggctcagttccggattctggatcactcgatcaggatcgaaatattgctgtacgccaaggccgtcgcaggtcgggcaggcccccgccgggttgttaaagctaaacagtcgcggctccagttcacgcatactgtagccgcaaattgggcaggcgaagttggcggagaacagcagctcttccgctttcgggtcgtccatatccgccactaccgcggtaccaccggaaagctccagcgcggtttcaaaactctcggcaagacgttgggtaagatcgtcacgcaccttgaagcgatcaaccaccacttcaatggtatgtttcttttgcagttccagttttggcggatcggaaagatcgcagacttcgccatcaatacgagcacggatgtagccctggcttgccaggttctccagcgttttggtgtgttcgcctttgcgctctttaatgattggcgcgagtagcatcagacgcttgccttccggctggctcagcacgttatccaccatctggctgacggtttgcgccgccagcgggacgtcgtggtccggacagcgcggctcgccaacgcgggcgaataacaaacgcaaatagtcgtggatttcggtgattgtccccaccgtagaacgcgggttatgagacgtgcttttctgctcaatactgatggcaggagaaagcccctcaatatgatcgacgtccggcttttccatcagactcagaaactgccgcgcgtaggcggaaagggattcaacgtaacggcgctgcccttcggcatataaggtgtcgaaagcgaggctggatttgccagaaccgctaagcccggtcacgacaatgagcttgtcgcgggggataacgaggttgatgtttttgagattatgggtgcgggcgccccgaacttcgatcttatccattcacctttcccggattaaacgcttttttgcccggtggcatggtgctaccggcgatcacaaacggttaattatgacacaaattgacctgaatgaatatacagtattggaatgcattacccggagtgttgtgtaacaatgtctggccaggtttgtttcccggaaccgaggtcacaacatagtaaaagcgctattggtaatggtacaatcgcgcgtttacacttattcagaacgatttttttcaggagacacgaacatggccagcagaggcgtaaacaaggttattctcgttggtaatctgggtcaggacccggaagtacgctacatgccaaatggtggcgcagttgccaacattacgctggctacttccgaatcctggcgtgataaagcgaccggcgagatgaaagaacagactgaatggcaccgcgttgtgctgttcggcaaactggcagaagtggcgagcgaatatctgcgtaaaggttctcaggtttatatcgaaggtcagctgcgtacccgtaaatggaccgatcaatccggtcaggatcgctacaccacagaagtcgtggtgaacgttggcggcaccatgcagatgctgggtggtcgtcagggtggtggcgctccggcaggtggcaatatcggtggtggtcagccgcagggcggttggggtcagcctcagcagccgcagggtggcaatcagttcagcggcggcgcgcagtctcgcccgcagcagtccgctccggcagcgccgtctaacgagccgccgatggactttgatgatgacattccgttctgatttgtcattaaaacaataggttatattgttttaaggtggatgattaaagcatctgccagccataaaaaagaagcctccgttatggaggcttctacgtatcaggtcaaaatcattggccattgtggcggtgtctgattcatctcttctatcatcacgctctcgatgttgtgccagatagcggtgatgtccgccattgtgatgccaagcaaccccattgcgaaccaacaggcggaaacaacgcccagaccgctgctgatcaccgcaagcccgacataatcagaccgacgaaaacggatgttgagtgtgctggccagaaacatcattacggcactaagaagttgccagcgaagaagaaccacgccagtggtgagggtagccatcaaacaattcctctgaaaagagccgatgccctggacagcgcggcgttgttcacgggaggcgtggtacactctggctatcgcggggcttgcagaacacaaaaatgaaacactctgtttgtttcattaattttgtgaactatatcacaattgattgtttgttagccatattaggccgtgacttttattgctgtacagattatgtggtttttcagtggcattaagggcatatcttcccgccgcctctgcattcctgtaggaaattaattttgaatatcaatgaattattttcatccaggtgacgattagaaaggtatcaatttcaaatcaggcaaaagtgctatttataccgtaagatttatctaaagacgtcggtacccagggttttcaccttgcaatggccgggtataaacaggcaggaaattgatagcaatgagtcatcgtgcacgacaccaattactggcgttgccgggcattatctttttagttctctttcccatcattcttagcctatggattgccttcctttgggcaaaaagtgaagtgaataatcagctccgaacctttgctcaactggcactggataaatccgagctggtcattcgccaggcagatttagtgagcgatgcagctgaacgctatcaggggcaagtttgcactccagcccatcaaaagcgaatgttgaatattattcgtggctatctttatattaatgaattgatctatgcccgtgataaccattttttatgcagtagcctgatagcgcctgtaaacggctatacgattgcaccggccgattataagcgtgaacctaacgtttctatctattattaccgcgatacgccttttttctctggctataaaatgacctatatgcagcggggaaattatgtggcggttatcaaccctctcttctggagtgaagtgatgtctgatgacccgacattgcaatggggtgtgtatgatacggtgacgaaaacctttttcagcttaagcaaagaggccagcgcagcaacgttttctccgctgattcatttgaaggatttaaccgtacaaagaaatggctatttatatgcgacagtttatagcacaaaacgcccaattgcagccattgttgcgactagttatcaacgtcttataacccatttttataatcatcttatttttgcgttgcccgccggtattttggggagtcttgttctgctattactctggctacgtattcgacaaaactatttatctcccaaacgtaaattgcaacgcgccctcgaaaaacatcaactttgtctttattaccagccaataatcgatatcaaaacagaaaaatgtatcggcgctgaagcgttgttacgttggcctggtgagcaggggcaaataatgaatccggcagagtttattccgctggcagaaaaggaggggatgatagaacagataactgattatgttattgataatgtcttccgcgatctgggcgattacctggcaacacatgcagatcgctatgtttctattaacctgagcgcctccgattttcatacgagtcggttgatagcgcgaatcaatcagaaaacagagcaatacgcggtgcgtccgcagcaaattaaatttgaagtgactgagcatgcatttcttgatgttgacaaaatgacgccgattattctggctttccgccaggcaggttacgaagtggcaattgatgattttggtattggctactctaacttgcataaccttaaaagtttgaatgtcgatattttgaaaatcgacaaaagctttgttgaaacgctgaccacccacaaaaccagtcatttgattgcggaacacatcatcgagctggcgcacagcctggggttaaaaacgatcgctgaaggcgtcgaaactgaggagcaggttaactggctgcgcaaacgcggcgtgcgctattgccagggatggttctttgcgaaggcgatgccgccgcaggtgtttatgcaatggatggagcaattacccgcgcgggagttaacgcgcgggcaataaaattacaggcggtggcgataatcgctgggagtgcgatcaaactgccgacggaaaacgcgggagaaggtctgctggctgacataacccaggtccattgcgatatcaaaaatcggacgctcggtggtgcgcaactcaacggcggccagtaacaggcggcgttggcgaatgtaatcgccaagcgtctgatgcgtcaccgtgcggaacattcgttgcaagtaccacttactatagccacttttttttgcgactacatcaatgttaagcggctggtcaatatgctcgtcaatccatgcgataagatcctgaataattttctgatgggacataaatctgcctcttttcagtgttcagttcgttaattcatctgttggggagtataattcctcaagttaacttgaggtaaagcgatttatggaaaagaaattaccccgcattaaagcgctgctaacccccggcgaagtggcgaaacgcagcggtgtggcggtaagcgcgctgcatttctatgaaagtaaagggttgattaccagtatccgtaacagcggcaatcagcggcgatataaacgtgatgtgttgcgatatgttgcaattatcaaaattgctcagcgtattggcattccgctggcgaccattggtgaagcgtttggcgtgttgcccgaagggcatacgttaagtgcgaaagagtggaaacagcttagctcccaatggcgagaagagttggatcggcgcattcataccttagtggcgctgcgtgacgaactggacggatgtattggttgtggctgccttagccgcagtgattgcccgttgcgtaacccgggcgaccgcttaggagaagaaggtaccggcgcacgcttgctggaagatgaacaaaactaaagcgccacaagggcgctttagtttgttttccggtctttgtctttctctctatcccgctggtacacaggagggtttcccccgacgtcaacacacctcattcgagcacgtggtggaggttccggttggtgttgatgctttaattgtatgtcaccgacgtttcttcgccagtgtaaaagtatactttttaaccgcaatatttttgtcatctcagacgattttttatcgcaatcctgaacggtatacggctcgataacgctgcaatcttgcgcaccgacgataacgtttgcgcatcaattgcctggtttttcatcgtcaagacaataaaagagaaaaaagcagcaaacttcggttgaaaaagccgctatgatcgccggataatcgtttgctttttttaccacccgttttgtatgcgcggagctaaacgtttgcttttttgcgacgcagcaaattgtcgcaaacctggagcaggaagataacgtttcgctggcaggggattgtccgccacgcatcttgacgaaaattaaactctcaggggatgttttcttatgtctacgccaagtgcgcgtaccggcggtagtctcgacgcctggtttaaaattagtcaacgtggaagcactgtccgtcaggaagtggttgccgggttaacaacgtttctggcgatggtctacagcgtcatcgtcgttccaggtatgttgggtaaagcaggcttcccgcctgcggcagttttcgttgcaacctgtctggttgccggactcggttctatcgtgatgggtctgtgggctaatctgccgttggcgattggttgcgccatctccctgacagcgtttaccgcattcagcctggtgctggggcaacatattagcgtacctgtcgcgctgggtgccgtgttcctgatgggtgtgctgtttacggtaatttctgccacgggtatccgtagctggattttgcgcaacttgcctcacggtgtggcgcacggcacggggattggtatcggtctgttcctgctgctcattgccgctaacggtgtcggtctggtgattaaaaacccgcttgatggtctgcccgttgcgctgggtgatttcgcgaccttcccggtgattatgagtctggtaggtctggcggtgatcatcggcctggaaaaactgaaagtccctggtggcattctgctgaccattatcggtatcagtattgtcggtttgatcttcgatcctaacgtccatttctccggcgttttcgccatgcctagtttgagcgatgaaaacggcaatagtctgattggcagcctggacattatgggcgcgctgaatcctgtagtcctgccaagcgttctggcgctggtgatgacggcagtatttgatgccaccggaactatccgtgccgtcgccggccaggcgaacctgctggataaagatgggcagatcatcgacggtgggaaagcactgaccactgactccatgagcagcgttttctctggcctggtgggtgcggctccggcagcggtatacatcgagtctgcggcgggtacggcggcgggcggtaaaaccggtttgacggctatcaccgttggcgtgctgttcctcctgattctgttcctctctccgctctcttacctcgttccggggtatgcaacggctccggcgctgatgtacgttggcctgctgatgctgagcaacgtggcgaaaatcgactttgctgattttgttgatgcgatggcgggtctggttacggctgtattcatcgtgctgacctgtaacatcgtaacaggcatcatgatcggcttcgcgactctggtgattggtcgtctggtttccggcgaatggcgcaagttgaacatcggtacggtcgttatcgccgtggcgctggtgaccttctatgcgggtggctgggctatctaatctttcatcggattctgaaaacgggtggcaatggctgcccgtttttattttctccgcacattgtgtgagcttttgcgatattctgaaaaaaatgagaattcaggcataacgtctttctcagatcataaaaaacatcgcaaacagggaacgcatggaaatcttcttcaccatactgataatgaccctcgtggtcagcctgtccggggtggtcactcgtgtcatgccctttcagatcccgcttccgcttatgcaaatcgccatcggtgcgctactggcgtggccgacgtttggtttgcatgtggagtttgatcctgaactctttttagtcttgtttatcccgccgttgctgttcgctgatggctggaaaacgccgacccgtgaatttctcgaacatggtcgagagattttcggcctcgcgctggcgctggtggtggtcaccgtggtcggcattggcttccttatttactgggtggtgccgggcattccgctgatccctgcctttgcgctggcggcggtgctttctccgaccgatgctgtggcgctctccgggattgttggcgaagggcgcatcccgaaaaaaatcatgggcattttgcagggcgaagcgttgatgaatgacgcctccggtctggtgagcttgaagtttgccgtagcagtggcgatggggacgatgatcttcaccgtcggcggtgcgacggtcgaatttatgaaagtagccattggcggtattctcgccggttttgtggtgagctggctgtacggtcgcagcctgcgattcctcagccgctggggcggtgatgaacccgcgacgcagatcgtcctgctgttcctgctgccattcgcttcttatctgattgccgaacatattggcgtttccggcatcctcgctgcggttgccgccgggatgaccatcacccgctccggtgtgatgcgccgtgcgccgctggcaatgcgcctgcgtgcaaacagcacctgggcgatgctggaatttgtctttaacggcatggtgttcctgctgttaggtctgcagctgccgggtattctggagacgagcctgatggcagcagaaatcgaccctaacgtcgaaatctggatgctgtttaccaatattattctgatatatgcggcgctgatgctggtccgtttcggctggctgtggacgatgaaaaagttcagcaaccgcttcctgaagaagaagccgatggagtttggtagctggaccacacgagaaatcctgatcgcgtctttcgccggggtgcgtggggcgatcactctggccggtgtgctctctatcccgctgctcttgccggatggtaacgtcttcccggcgcgctatgagctggtgttcctggcggctggcgtcattctcttcagcctgtttgtcggcgtggtgatgttgcctattctgctacaacacattgaagtcgcggatcatagccaacaattgaaagaggaacgtattgcgcgagcggcaacggcagaagtggcgattgtggcgatccagaaaatggaggagcgtctggcggcggataccgaagagaatatcgataaccagctgcttacggaggtcagttctcgcgtcattggtaacctgcgtcgtcgcgccgatggacgtaacgacgttgaaagttccgtgcaggaagagaaccttgagcgtcgcttccgtctggcggcattgcgttctgaacgtgctgaactttaccacctgcgcgccacacgggagatcagcaacgaaacgctgcaaaaattactgcacgatctcgatttgcttgaagcgttgctaattgaggaaaatcagtaagccgaaagcgacgtaaccaggcccgaggtaatctgaaaaaggtgcaatcttttgcacctttaacaggttagctcgggctaacattcatgattctaaaacaaataaattatctctcttttaaagtcaattcattggctgttcttcgacttaacctcaatctgcatcttgcataatatctgcagtaatcttcatagcgactgcatgaagattatcctcagtttgactcatgccagtatgagtggcacaatcttcttcaaagaatttctgtagtgttaccaggatatcactattaatggagatattttcctcaccacggagaatggtaatacccattccctggacgctagcctcatcgaaattaacacgatagagacggatattaaacatccaggcttttgttaaaacagaacagttgaaatggcaattgcttaaattggcattattaaaattaacattagccatattagagtcggtacatataaccatttcgaggaacgtatttgttaaccgcgtaaaaaagagtttgctatcaattaagtttatattctggagggttgctttattcaggttgacacgagacagatcagcatgttcaaagttaattaaatcaagtttagagaagctaaggtcggctctaaataaattaatatatggcgctattactttataaagatttacctcagccatgtatgccatataaaaattactataatcaaggaaggtatttttaatattggctctattcattgttgcattgtagaattgaacatgcatagcggaacaactatttagagttccgtcagtcatttttatctgagcgaaattactgtcatcgagaatacaattatcaaaaagtattttttccattatggcgaaattaaaattcgttttatacatattacagtcctgaaaaatagcgttttgtagtctgcaacctgcaaaattgctattggataaatcttcatctttaatcacgatacctttcaggctaaggtgactaaaatcgtaaccaccatttactgtctgtgggatttcgatagtattattatggacggtgacattatttataaaatataccaccttaatactcacttccttatctttattaaggtaaactcttctcgtaattctatcgtcacatttattatttgcatgactagctatatctataaaatatttatgtattttcctgtccgtttctttcgtgatttttccacttggtaaactatcataaattcttttcattttctgaatcaagcctatcactttttcatgatcatccattttgaaaagagagagggctttattgtcaattaacgtgtttttatgatgtttgctgtaattatcactttttgttttctttgtatgacttggacttgtgacagagtggttatcgttaatcaggcaaagagggaaaaacatattatttaaaccattatagcgcataaaatatccttataattaacaagaaagaaaaggcatattctctgcattatcattttctacgactgtcaaaaatcgctcattttttaatgagtttatttgtttaatattatgggaaaaggtgatgcatttgggagaggaagagtattccccggtcagacgaccggggaaggggagagattaatgcgcgcggccttgctcaacgccaaagccggtctgggagcggataaactgcgcgcggaacagttcacgctcacgcgcgccttccgcactgttatcggttgcgctgaagaaccagatgccgaggaatgccacggtgatagagaacagcgccgggtattcatacgggaagatggctttttcgtgaccaaggatctgtacccaaatcgtcgggccgaggatcatcagtactactgcggtaatcagccccagccagccacccatcatcgcgccacgcgtggtcagtttgctccagtacatagaaagcagaatgatcgggaagttacagctcgccgcgatggcaaacgccagccccaccataaaggcgatgttctgattctcaaacagcacgccgaggataatcgcaatcacgccgaggatcagtacggtgattttacttacccgcagctcttcacgttcggtcgcgccttttttgaagacgttagcgtacaagtcatggctaaccgcggatgcgcccgccagcgtcagacccgcaaccaccgcgaggatagtggcgaaagcaaccgcactaataaaaccgaggaacaggttgccgcccactgcattcgccaggtgaacggccgccatgttgttaccaccaatcagatggcccgccgcgtctttatattccggattcgcaccaaccagcatgatcgcgccgaagccgataataaaggtcagaatatagaagtagcccataaacccggtggcgtagaacacgctcttacgtgcttcgcgggcatcgctgactgtaaagaagcgcatcagaatgtgcggcaagcccgccgtaccaaacatcagtcccagacccagagagagcgcggagatcggatctttcaccagcccgcccggcttcatgatgtcgacacctttcgggtgtaccgccatcgcttcactgaacagattgttgaagctaaagccgacgtgtttcatcaccataaaggccataaagctggcaccgaacagcaacagcacggctttgataatttgcacccaggtggtcgccagcatgccgccgaacaggacgtacatcatcatcagcacgccgaccagcaccaccgcaatgtgatagttaaggccaaacagcagctcgatcagtttacctgcgcccaccatctgggcgataaggtaaagcgccaccaccaccagagaaccacaggcgctaagaatacgaatcggcccttgtttcagacggtaagaggccacatcggcaaaggtgtagcgccccaggttacgcagacgttcggcaatcaggaacaaaatgatcggccagcccaccaggaagcccaggctgtaaattaagccgtcatagccggaggtaaacaccagcgcggagatccccaagaaactggcggcggacatatagtccccggcaatcgccagcccgttctggaagccagtgatattgccgcctgcggtgtagtagtcgctacgagaacgtacgcgtttacttgcccagtaggtaatgccgagcgtaaacacgacgaaaatcaggaacataataatcgcctgccagttcgttggctggcgctctacggccccgctaatagcatccgcggcgttagctgcgaaagggagtgtggcggcaagcgccgtcagaactcttttcatgatgcttgtacctcatgcagttatttcaacttgcttgtacctcatgcaggacttcattattaagacggtcgaattcgccgttcgcccgccagatgtagataccggtgagaacaaaggagatcacaatcactccaacaccaattggaataccgcgtgtgacgctggtgttcggattcagcggcgtgcccagccagccgggcgcgaaggcgatcagtaaaataaagccgatataaactgccagcataataatgctcaggatggtggcaaaccgttgccgtttttcgactaactccctgaaatgcgcattgtcttctatccgctgataaatagtgccattcatcacagattctccagaggtaatgtagggattgttttaattcccgctcccttatgggagaaggttaacgctcgggtaacccttgccgaatgtaggccggataaggcgtttacgccgcatccggcaatcaatgcctgatgcgacgctgtcgcgtcttatcaggcctacaaaccgttaccgactcgcatcgggcaattgtgggttagcttggcatcgcgatagcctgcttctcttcaagcagcttctcgactacgccaggatcggcaagcgtgctggtatcgcccaggttgctggtatcgcccgccgcaattttgcgcagaatacggcgcataattttgccggagcgggttttaggcagggagtcggtccagtgcagcacgtctggcgtcgccagcgggccaatctctttacgcacccagttgcggacttctgcgtacagttctggactcggttcctccccgtgattaagcgtgacgtaggcgtagatcgcctgacctttaatattgtgcggaatacctactacggcggcttcggcaatcttcggatgcgccaccagcgcgctctcaatctctgccgtccccagacggtgaccggagacgttcagcacgtcgtccacacgcccggttatccagtaatagccatcttcatcgcgacgcgcgccgtcgccgctgaaatacatatttttgaaggtggagaagtaggtctgttcaaaacgttcgtgatcgccaaacagcgtacgcgcctgacccggccaggagtcggtgattaccaggctaccttcggtggccccctccagcgggttaccttcgttatcgaccagcgccggttgcacgccgaagaacggacgtgttgcgctaccggctttcagctcggtagcgccaggcagcggggtgatcatgaaaccgccggtttcggtctgccaccaggtatcgaccaccggacatttctcgttgccgatttttttccagtaccactcccacgcttccgggttaattggctcgcccacggaaccgagaatgcgcaggctgctacggtcggtgccttcgatcgctttatcgccttccgccatcagcgcgcggatcgccgtgggtgcggtatagagaatattgacctgatgcttgtccaccacctgcgccatacgggcaggcgtcggccagttgggtacgccttcaaacatcagcgtggtcgcaccgcaggccagcgggccgtacagcaagtaactgtgtccggtcacccagcccacatcggcggtgcaccagtagatatcacccggatgataatcaaagacatatttaaaggtcagcgccgcgtacaccagataaccgccggtagtatgcagcacaccttttggcttaccggtagaaccggaggtgtagagaataaacagcggatcttcggcgttcatctcttccgcctggtgctgatcgctcgcttgctcaaccaggtcgtgccaccacaggtcgcgcccttcctgccagtcaattttcccgccagtacgcttcagtaccaccacatgctctacgctggtgacgttcgggtttttcagcgcgtcatcaacgtttttcttcagcggaatactgcgcccggcacgcacaccttcgtcggaagtgatcaccagtcgactgttggaatcaataatgcgcccggcaacggcttccgggctgaagccgccgaaaatcacgctatgcaccgcgccaatgcgggcgcaggccagcatcgcaaccgcggcttccggcaccatcggcatataaatcgccaccacatcaccttttttaatgcccagctcgagcagggtattggcgaagcggcagacgtcgcggtgcagctctttatagctgatatgtttgctctggctggcgtcgtcgccttcccagatgatggcggtacgatcgccgttttcttgcagatggcggtcaaggcagtttgccgccagattcagcgtgccgtcctcgtaccatttaatggacacattaccgggggcaaaggaggtgtttttcaccttctggtaaggtttgatccagtcaagaatttttccctgttcgccccagaaggtatcaggtacgttaatagattgttgatacatcgcctcgtactgctgagggtttatcaggcaacggtctgcgatgttggcaggaatggtgtgtttgtgaatttggctcatgcttttgttctccttgtaggatgttaataatatgtggcataagcgttaaatgtaggggtattggcagttttgtttagtatttgggcgacagatcacgcaaaagtagaattgtgcaaataaacggcagggtaatttttgaaggtcagcaacaaaagttgattaattctttgaggaacatgcagttatgcatgctgttgaaaaagaggaagatactgactaactctaaagtggtattttacatgcacttacaattgattaaagacaacattcacagtgtggttatttgttacacataggggcgagcaatgtcatgacagtgtaggtgcggttactgtcgtgaaaaacaataaaaaccgccattgcaacaatggcgcaattcggatgaagcccctatgacaaggataaaaataaacgcacgccgtatcttcagcttattgattccttttttctttttcacttctgttcacgctgaacaaacggctgctcccgcaaaacctgtaactgtggaagcgaagaatgaaacctttgccccgcagcatcccgatcaatatctctcctggaaagccaccagcgaacagagtgagcgtgttgacgccctggcggaagatccacggctggtgatcctgtgggcggggtatcccttcagccgcgattacaacaagccgcgtggacatgcttttgctgtgaccgatgtgcgtgaaaccctgcgtaccggtgcgccgaaaaacgctgaagatggtccgctaccgatggcatgctggagttgtaaaagcccggatgtggcgcgtctgatccagaaagacggcgaagatggctacttccacggtaaatgggcgcgcggcggtccggaaatcgtcaacaacttaggttgtgccgattgccataacaccgcctctccagagttcgccaaaggcaaaccggagttaaccctttcccgtccgtatgcggctcgcgcgatggaagccattggtaaaccttttgagaaagccggacgtttcgaccagcaaagcatggtttgcggtcagtgccatgtggagtattacttcgacggcaaaaacaaagcggttaaattcccgtgggatgacggcatgaaagtcgaaaatatggagcagtattacgacaaaattgccttctctgactggactaactccctgagcaaaacgccaatgctgaaagcgcagcacccggaatatgaaacctggacagcgggcattcacggtaaaaacaacgtgacctgtatcgactgccatatgccaaaagtgcagaacgccgaaggcaaactctacaccgaccataaaattggtaatccgtttgataacttcgcccagacttgtgcgaactgccatacccaggacaaagctgccttgcaaaaagtggtcgcggaacgtaagcagagcattaacgacctgaaaatcaaggttgaagatcaactggttcacgctcacttcgaagcgaaagcagcgctggatgcaggcgcgacggaagctgaaatgaagccaattcaggacgatatccgtcatgcccagtggcgctgggatctggcgatcgcttcccacggcattcatatgcacgcaccggaagaaggtttacggatgctcggtacggcgatggataaagcggcggatgcacgcaccaaactggcgcgcctgctggcgaccaaaggcatcacccatgaaatccagatcccggatatcagtaccaaagagaaagcccagcaggccattggcctgaacatggaacaaatcaaggccgagaagcaggacttcatcaaaacggtgatcccgcagtgggaagaacaggcacgtaaaaacggtctgttaagccaataaccccgttccgcctcgcaaggggcggaaaacacaatggagtgaatatgagcgtattacgtagcttattaactgccggggtgctggcgagcggcctgttgtggagcctgaacggaattaccgctacccctgcggcgcaggcatctgatgatcgctacgaagttacccagcagcgtaacccggatgccgcctgtctggactgtcataaaccagataccgaaggtatgcatggaaaacatgcttccgttatcaacccgaataacaaactgccggtcacctgcaccaactgtcacggccagccaagtccgcaacaccgcgaaggggtgaaagatgtgatgcgctttaacgagccgatgtacaaggttggagagcagaacagcgtctgtatgtcctgtcatctgccggaacagttgcaaaaagcgttctggccgcacgatgtccacgtaaccaaagtggcgtgcgccagctgccattccctgcatccacagcaagatacgatgcagacgttaagtgacaaaggacggattaagatttgcgtcgattgccacagcgatcagcgcaccaatccgaactttaacccggcgtctgttccgttgcttaaggagcagccatgacctggtctcgtcgccagtttctcaccggcgtcggcgtgctggcagccgtcagcggcaccgcagggcgcgtggtggcgaaaacgttgaatatcaatggggtgcgttacggcatggtgcatgacgagagcttatgcatcggctgtaccgcctgtatggatgcttgtcgggaagtgaacaaggtgccggaaggcgtcagccgcctgacgattattcgtagcgagccgcagggcgaatttcctgatgtgaaatatcgcttcttccgtaagtcttgccagcactgcgatcatgcgccgtgcgttgacgtctgcccgaccggtgcgtcttttcgcgatgctgccagtgggattgtcgatgttaatccggatctctgcgtcggttgtcagtactgcatcgccgcctgtccgtaccgcgtgcgctttatccatccggtcacgaagacggcggacaaatgcgatttctgccgtaagaccaatttgcaggccggtaagttgcccgcgtgcgttgaagcttgcccgaccaaggcgctgacgtttggcaatctggacgatcccaacagtgagattagccaactgctgcgccagaagcccacttaccgctacaagctggcgctgggaaccaaaccgaagctgtaccgcgtaccgtttaaatacggggaggtgagccaatgacgcagacttccgcatttcattttgaaagcctggtgtgggactggccgattgccatctacctgtttttgattggtatttctgctggtctggtgacgctggccgtgctgttacgtcgcttctacccgcaggcgggcggtgcagacagtacgttgctgcgcaccacgctgattgtcgggccgggcgcggtgatcctcggtctgttgatcctcgtcttccacctgacaagaccgtggaccttctggaagctgatgttccactacagttttaccagcgtgatgagcatgggggtgatgctgtttcagctctacatggtggtgctggtgctgtggctggcgaaaatctttgaacatgatttgcttgccctgcaacaacgctggttgccgaagctggggatcgtgcaaaaggttctgagcctgctgacgcccgttcatcgcggactggaaacattgatgctggtgctggcggtgttgttgggggcttataccggctttctgctgagcgcgctgaaaagctatccgttcctcaataacccgatcctgccggtgctgttcctcttctccggcatcagctccggtgcggcggtggcgctgatcgccatggcgatacgccaacgcagtaacccgcattccacggaagcgcagtttgtacaccgtatggaaatccctgtggtatggggtgaaatcttcctgctggtggcgttttttgtcggtctggcgctgggcgatgacggtaaagttcgtgcgctggtggcggcattaggtggcggtttctggacgtggtggttctggcttggtgtcgccgggctggggctgattgtgccaatgctgctcaaaccgtgggtcaatcgcagttccggcattcctgccgtgctggcggcgtgtggggccagtctggtcggcgtgttgatgctgcgctttttcattctctacgccggacagttgacggtggcgtaagccagaaaagaggtggtttctggacgtattccttcctgaagtcggttttctggcgttgttgttaagtctcggggtcaacgtgttgaccccgttgacggccttcgcgggagtgcggttgcgctggcctgccatgatgcgactcacttgcatcggcattctggcgcagttcgcgctcctgctgctcgcctttggcgtactgacgtattgttttctcatcagcgatttcagcgtcatttatgtcgcgcaacatagctatagcctgctgagctgggaactcaagctggcagcggtgtggggcggccatgaaggtagcctgctgctttgggtgctgctgctttccgcctggagcgcgctgtttgcctggcattatcggcagcaaaccgatccgctatttccgctgacgttagccgttttatctctcatgctcgccgcactgctactgtttgtggtgctgtggtccgatcccttcgtgcggatatttccaccagcaatcgaaggccgcgatctcaatccgatgctgcaacatcccggtcttatctttcatccaccgctgctttaccttggctatggcggtttgatggtagcggcgagcgtggcgctggcgagtctactgcgcggcgagtttgatggtgcctgcgcccgaatttgctggcgctgggcgttacctggctggagtgcattaacggcggggatcatcctcggttcctggtgggcctactgcgaactcggctggggcggctggtggttctgggatccggtggaaaacgcctctttattaccctggctttctgccactgcgctgctgcacagtttgtccctgacacgccagcgggggattttttgccactggagcctgttgctggcgatagttactctgatgctgagcctgctgggcaccttaattgtccgttctggcattctggttagcgttcatgcgttcgcgctggataacgtccgcgccgtgccgttgttcagcctgtttgcactgattagccttgcgtctctggctctgtatggctggcgagcgcgggacggtggcccggcggtgcattttagcgggttaagccgggaaatgttaatcctcgctacgctgttgctgttttgcgcagtgctactgatcgtgctggtgggaacgctttatccgatgatttacggcctgctgggctggggacgcctctccgttggcgcgccgtattttaaccgcgcgacgttaccgtttggtctgttgatgctggtggtgattgtgctggcgacgtttgtctctggcaaacgcgtgcagcttccggcgctggtagctcatgcgggcgtgctgttatttgccgctggggtcgtggtctccagcgtcagccgtcaggagatcagcctgaatttacagccgggtcagcaggtgacgctggcaggatacaccttccgttttgagtgcctcgatctacaagccaaaggcaattacaccagcgaaaaagcgatagtggcactgtttgaccatcagcaacgcattggtgaactgacgccggagcggcgtttttatgaagcacgccgtcaacaaatgatggaaccgagtattcgctggaacggcatccatgactggtatgcggtcatgggggagaaaactgggccggatcgttacgcttttcgtttgtatgtacaaagcggtgtgcgctggatctgggggggaggattgttgatgattgcgggcgcattgttaagcggatggcgggggaagaagcgcgatgaataaagggcttctcacgctactgctgttatttacctgttttgcgcacgctcaggtcgtagacacctggcaattcgccaatccgcaacaacagcaacaggcgttaaatattgccagccagttacgttgtccgcagtgccagaatcaaaacttactggaatccaacgcgccggtggctgtcagtatgcgccatcaggtttacagcatggtggcggaggggaagaacgaagtcgaaatcattggctggatgaccgaacgctacggagattttgttcgctataacccaccgttaacgggtcagacgctggtgttatgggcgctgccagtggtgttgttactgctgatggcactgatcctctggcgagtgagggcgaagcgatgaaacagcccaaaataccggtgaaaatgctgacaacactcacgatattgatggtatttctctgtgtcggcagttatctgttaagcccaaaatggcaggcggtacgtgcggagtatcagcgtcagcgcgatccgctacatcagtttgccagccagcaaaccccggaagcgcagcttcaggcattgcaggataaaatccgcgctaatccacaaaacagcgaacagtgggcgttactgggcgagtactatctgtggcaaaacgattacagcaatagcttgctggcgtaccgtcaggcgttgcaactacgtggtgagaacgctgaactgtatgcggcgctggcgacggtgctttattaccaggccagccagcatatgaccgcccagactcgcgcaatgatcgacaaggccctcgcgctggacagtaatgaaatcaccgccctgatgctgctggcttccgatgcgtttatgcaggcgaactacgcgcaagccatcgaactatggcaaaaagtgatggatctcaacagtccgcgagttaaccgaacacagctggttgagagcattaatatggcgaaattgttgcagcggagattggattaatcatctggtgatgaagattatgtcattgagctgcataaaaaataatcgaatgaacatatgccaaaaataatcactaatcagtattattgcagattaaacaaataaaaatctttccataacaaatggttattcattaatcctgccataaactcgcgttattatgcattaatgcagcgaaaagctctgttgttaaagggttgcgcaacataccgcgcaaatgatactgatcataagcgttaaaaaaatctacaaaccaacgcaacacaattcatgccccggcagtatgtcacgttctcgcgtttctgaacggggaacggcgctccattgaggaagtcattcatatgaaaaatataaaattcagcctggcctggcagattctgtttgctatggtgctgggcattctcctgggaagctacctgcactaccatagcgacagccgcgactggctggtcgtcaatttgctctctccggcgggtgatatcttcatccatctgattaaaatgattgttgtgccgattgtgatctccacgctggtggtgggtatcgcgggtgttggtgatgccaaacagctcgggcgtattggcgcgaaaaccattatctacttcgaggtgatcaccaccgtcgccatcattttggggatcactctggcgaacgtcttccagcccggtgccggggtggatatgagccagttggcgaccgtcgatatcagcaaatatcagagcactacggaagcggtacaaagcagttcccacggcattatgggcacgattttgagcctggtgccgacgaacattgtggcgagcatggcgaaaggcgaaatgctgccgatcatctttttcagcgtgctgtttggtctggggctttcttccctgcccgcgacgcatcgtgaaccgctggtgaccgtgttccgctccatctctgaaaccatgtttaaagtgactcacatggtgatgcgttatgcaccggtgggtgtgtttgcgctgattgcggtgacggtggctaactttggtttcagctctctgtggccactggcgaaactggtgctgctggtgcatttcgccattctgttcttcgcgctggtagtgctgggaattgtggcgcgcctgtgcgggttaagcgtctggatcctgattcgtattctgaaagatgagctgattctggcgtactccactgccagctctgaaagcgtgctgccgcgaattattgagaagatggaagcctacggagcaccggtgagcatcaccagtttcgtggtgccgaccggttactcttttaaccttgatggtagcacgctgtatcaaagtattgccgctatcttcatcgcgcagttgtatggcattgacctgtccatctggcaggaaatcattctggtgctgacgctgatggtgaccagcaaagggattgctggcgtgcctggcgtgagctttgtggtgttgctggcaacgctgggtagcgtaggtattccgctggaaggtctggcgtttattgctggtgttgaccgtatcctcgacatggcgcgtactgcgctgaacgtggtgggtaatgcgctggcggtgctggtgattgccaagtgggaacacaaatttgaccgtaagaaagcgctggcttatgagcgtgaagtgctgggcaaatttgataaaactgcggatcaataattgaagattgccggggatatccacccggcaatgtgtgaatgcctgatgcgacgcttgccgcgtcttatcaggcctacgccagacagcgcaatagcctgatttagcgtgattttgtaggtcggataaggcgtttatgccgcatccgacatcaacgcctgatgcgacgcttaacgcgtcttatcaggcctacgccagacagcgcaatagcctgatttagcgtgattttgtaggtcggataaggcgtttacgccgcatccgacatcaacgcctgatgcgacgcttgccgcgtcttatcaggcctacgccagacagcgcaatagcctgatttagcgtgattttgtaggtcggataaggcgtttatgccgcatccgacatcaacgcctgatgcgacgcttaacgcgtcttatcaggcctacgccagacagcgcaatagcctgatttagcgtgattttgtaggtcggataaggcgtttacgccgcatccgacatcaatgcctgatgcgacgcttgccgcgtcttatcaggcctatcttaaccgttggttaatttttcaaactcttcacacccggtatcaaacccttccatacagctcaggttcaaccagtgcagcgccttttgcttgttcttctcgataaaaccttcttcaccgtttaagaacatcattcccgcccagtactcggaataaccggttcgggaaattgcagagctgcgtttgaaataccaggttgccttgtcatcgtcggccttaatgcccacgccgttggcgtaaatcaaaccaagcagcatttgggcatcgacggcagagtcgttctccagatcttcgctggcgttttctaacaggctaattgcctttggataatccggtttacccgcttgagtatttaccagaatatgcgccagcgttacttcaccttctttactgcccgcttgcgccgctttctctgcaagaacttttgcttgtggatagtccagactgaccggattggtgattttgatctgcgccagcagcgcgcaggcatcagcatcaccgctgtcggcggctttctgtgcccaatattcggctttgctcaaatcgccggagctaaaccagctgtcggcaagaaaatattgtgcgcgtcggtccccggcctctgctgcctttaaatactggctgccaggctcggagtcgttggcgtgggcaaagaatgtcaaaaacaacatcaatgcgataatttttttcattttgataatacgattgggtagggagtaaccagtataaagagttcgaatggataaaaaaacagcctccgaaaggaggctgtagaaaggacggtattacgccagtgccgcttcgcgcaggcgagttttcaacttgttgtactcgtcaatcacgtactgctcggcggcgcgctgatcggcgatcggctcgacgcgaacggcgcagtatttgtactccggcgttttcgtaatcgggcttaagttttcggtaaccagctcgttacaggcaccaatccaccactggtaggtcatgtaaatcgcccctttgttcggacgatcgctgacctgcgcacgggtgataattttgcctttacggctgtgcacccaaaccaatgcctcatcttcaatacccagacgtttggcgtcttcggtattgatttgtgcgtagccaggttcatcagccagcgccgccagtgccgcacagttaccggtcatgctacggcaagagtagtgaccaacttcacgcaccgtactcagtaccatcgggtactcgtcggtgagtttgtcgattggcgctacccagtcgcaggtgaagaactgcgccagaccgttcggggtatcaaacttctctttaaacagataagaagtcccctgatcggcatcactagtatcgcggcaaggccactgaatgaagcccagttcgcccattttctcgtaagtcgcaccgtagaaatccgggcacagatgacgcaactcatcccagatctcctgggtgttgttgtagtgcatcggataacccatacgggtggcgatttcactgatgatttgccagtccgttttcagatcccatttcggttcaaccgccttgaagaaacgctggaagccacggtcagccgcagtaaacacgccttcatgctcgccccagctcgtactcggtaaaataacatccgccgcgctcgcggttttggtcataaagatgtcctgaacgataaccagttccagatcttcaaaggctttacgtactgcgctcagctccgcgtcagtttgtagcggatcttcgcccataatgtacgcggcacgcacttcgccatgcgctgcgcggtgcggcagctcgctgatgcgatagccggtatgcgctggcaggctttccacgccccaggctttggcgaatttctcgcggttagccggatctttcacgtactggtatcccggatacgtatccggcagcgcgcccatatcgcaggcaccctgaacgttgttctgaccacgaaccgggttaacacccgcatgcggcttaccgaggttaccggtcagcatcgcgaggctggtcagagaacgcacggtttccacgccctggtagaactgggttacacccatgccccacaggatggcggcgcttttcgcctgggcatacatccgtgccgcctgacgaatctcactggcgctgacgccggtgatatcttcaacgctctccggcgtgtagccttcaacgattttacgatactcttcaaagccttctgtacgactagcgacgaacgctttgtcgtacagattttcttcaataatgacatggcccatcgcattcaacagcgcgatgttgctgccgtttttcagtgcaatgtgcatgtcagcaatgcgcgcggtttcaattttgcgcggatcgcagacgataattttcgccccgttacgtttagcgttaattacgtgattcgccacgattgggtgggaatccgccgggttgtacccgaaaacgaacactaaatcggtattatcaatttcgttaatagcattgctcattgcgccattaccgacgctttggtgcagacctgcaacgcttgggccgtgtcagacacgagcgcagcagtcaacgttattggtaccaataacggcgcgcgcaaatttttgcattacatagttggtttcgttacccgtaccacggctggagccggtcgtctggatggcatccggaccgtacttctctttgatggcgctcaggcgctcggcaacgtaattcagtgcctcatcccaggaaacaggttcgagtttgccgccacgctggcgacggatcatgggggttttcaggcgcggggtcaggatctgggtatcgttaatgaagtcccagccataataacccttcagacacagggtaccctggttggttttcccctgcgctgcctccgcccggacgattttgccgttatcgacgaccaggttgattttgcaaccacttgcgcaataggggcaaaccgtgacgacttttttcatcggtctcgctccagttaatcaaatcacgcatacgcgctctcgactacagtatgcatcttttatgccacattttatgtggggtcattccctgatattacgggcactatttattcaaaactctgacgaaaaacaggctgtcgtcagttttgacgtgacgaaacgaaataccgcgtgacagccatcacgcggcagacattttattttttctcgacgacgggacctgcctgatacccgccgcccaggcttttcatcaactgaatgctttggatcacccggcggctgtccagcatcagtaaactcatctcttcggcaagcactggcaaccgggcttcggtggcctgtaagcggctggttaagccgcgctgataggcggcctcggcagcgcgctgggtaaagcgcgtggcttccacgcgttcagcctgcatttctcgctcgtcgttgagcgtttgcagacgcgtgccgttgacggcaacgtcacgcaccgcgttcagtacactctggttgtaacgttcaatcatcatgttgctggcggcgcgcgtgccttcgagattggcattcaaccgtccaccgtcaaacagcggcaatttcagacccgggatgaagttgaactggcgactggtttttttgaataaggtatgcagatggatggagtccagaccgaaaaacgctttgatatcaaagctcggatagaacaacgcccgcgcggaatccacctgatctaaactcgcctgaacataccagcgcatggcttgcagatccgggcgtctggcgagcaactcataagagagtgtcgccggaatgccggtctggacttgcggtaatgccaccggtctgatctccggcatatcgctggctcccgcgccaatcaatgcacgcagagattctcgcgtttcggtgatttgccctttgacggcaacaatttgtttatcgaccgccagaatctgtgcccgcgcgccgtggaaaggcacttgcgcttccagaccgtgcgccactttactctggtgcgctttcaccgcgtaatcaatcacatcgtgagtttgttctaacagatcgagcatctgatagctggcctgcatactgtaataaagctgcgctacgcccgtggccaggcttagctctactgctgcggtttctgccagcgcggcattatgcgcgccaatggcggcggcaaccgcactgcgatgcacaccccacaaatcaagatccagtccggcaaacaaacctactgtggcttccgtatagtacggcccgtccatacccagtgctggcgcatccatactataagggcttaaaaagccgttcgcgctgacacgttggcggttgagcatccctaacgctgcgacctgtaattgactaccggcatctaacaaatcggcctgggactgcgctttttcttcccgcagtttcgcttcggcgagggtgtgactaccacttagcgtccgttggatcagcgcatccagctgcgggtcattgagttgtttccaccactgcgcctgcggccagccggagctggcaagatgaatatcgtcggccagtttgatttgttccggtttgagctgttgatgaggtgcagaatccttacgtaccagggcacagccggaaatcagcgtcgtgctgccgagaatgctgcacaacagcagacgactaagttgacgattgatcattgcgtggctccttgtgcctgttccgtggcgggcgttaatgccggggctgtccagtctggcaagcgggcgaaaagctggcagacgtgttgctcctgttttaataaggtgggcaggatggcctgagaggcgggtgtctcttcaagcgttatttgaggagaacggctgagtgcggttgccagaccggcagcgtatttctccagggcgtcggcaaactgacctgctctgtccggctgtagtgcgttatccagcgcctgcgcgctgttccaggtggcatcccaggcgtgaagaagatcgcggccctgacgaataaccgtttggctacgttcaatcagtaatgcgcgttcttcgctgtccagttgacgctccagcgccacgcgttggcacatctcttcacaggcattaaacgccgcatgcagaccgatacgaatttgcagataagtgcgcagagccgtgacttcctgctggcgtgggatccgcattactttacttaacatacccagcgtgccagccagtttttgcggcagtgtgcgcgcttcactttcaggccagacaaaggtgtaaatcaccgcggacaccacggtaccaatgatgatacccagggcgcgatcgcgaatttccaccaggtcgtacactgggccaaaaacgttttcgagcgtggcgagcgcgaaggtgaccaccatctgtgtgccgatataagaagagcgttcagagctggtggcaatccatgcgcccaacaggaaaatcggtgccagcacaaacagcaattcgacaatattgtccagccagggcatgaccagtagcgtgaataacagcgccagaatcgcgccgcaaaaggccccgccaaaacgcagcaccatcttctggtagctgctaccgacatttgggttagcgacgatcacgcatgtcagcatacaggtgtgaatgccttcccagtccacgccgctgtaaaaggtgtaacagatcaaacaggcgagcagcgtttttaccgcgtagcgcatatagtctggattggtaaaagcatcggcggccatacttggcggtttggctgcgggcgttggcggcgtattcgggtccatctgacccagttgtaacaacgtctggcagatattctccaggttacattcccgtgccgccatcgcttcactttcactgatccgccagtcgctttgccagcactgaccttcagcaacggcatgctgcagcttgttgatttcactagctaatttttgtcggaattcaataattgcctgagaatcagcaaaagaggtgggatcgtagcgattcagcgtgctgtaaatgtaggttaccgttgccacgcagctttgccaccatgcgttttgagttcgccagttggcatcgtccgcgaggcaaaagacattgagtttttgtagcgccagcgcctctctttcaatccgcgtttcgggtagcggtgcgaggctgtctgtcaggtgactaatggcatcatcaagccgatcattaagcgcctgatgcatttggctaatggcacgactgggaaaccacagcacgccgattaacgtcatcagcaaggttggatagaggccaacaacgatacaccacagcgttaagcgcacgaccacttccggatagtcgagcatggcggggaaggtttgcccgtaaatagcgacaatggcgacggcgaaaaagaccagccccaagcgatgggtgcgcatcaaaaacatgcagcccatcaggatcggtccggcgatgatcaatcggatcaacggttcgccgtaactccatttgtagatcaaaaacaggctgccgatctccagcaccgtggcaaccacaaacaagatcgcgacaaatttggtgtaaaacgcgttgctctgaataccgtaaaacagcactgccaggcttaacgccacaaaagggatctcaaaggtcatgctgatcagaatcaccagcaggcagcctacccagagttgcacggtctgcggcacgcgacctggtcgccgctcgcttaactcttcatgaaagaacgccagcagcctgaccaccggtaatggcagggagttgagcgcgctcattattgcggctcaagattagcgactgcgctagcgccgatgcggaacatttccgggtcaggtttatcgaccatgattttgaccggaaaacgctgggcaacgcggacccagttaatagaacgagacactttcggcaggccgcccagcaccaggccgccgtcatccggtagcacgccgtagccaatgctatccactttaccctcgaaggttttgccgctgtcactcatcaggcgaatcgttgcgggtgtaccactgcgaatatttttcagatcggtttcgcggaagttggcgatcacataccagtgacgagtgtcgattagggtaaaaatagggcgcatggcagaagcaaattgcccgacggaggttttgagggaaatgacccggccatcaaacggcgcgcgaacggtcgccatttccagatgcagtttggtcagggcaatatccgcttcgaccgccgcacgctgggcaactaatgcatccacgccgctgacggcgctggcggcactctgcgcctgtaacaatacggcattaagatccgcttctgcggcgcgctgcgccgttcttgcacggtcaacatcttccgcactgacaaaaccttctttcagtaatggctcggtgcggcgtaatgtatctgtggcctgtttcgcggcggcacgggctttttctaccgtggcattaacgctgtcggcaccaaactgttgcgcgtcaacgctacgctgggtgagcataatttgcttatccagcgccgcgagggaggcttcagctttcgccagattggcttcgtacgggcgcgggtcgatgcggaacagcaaatcgccctgtttgactgcctggttgtcggtgaccgccagttctacaatgcggccgctgacttccggtaccacatcaatggtatctgcactcgcgtaagcgtcattagtacttggcgcactgtctacgcgccagataacgaaaacaagggcaaccagcgccaacgcaaccactaacagagcagggaatttactgcgaggagcttttttcggcgtactttccatgagcgcgtctcaaatagattagaaaaatgccagccagaacagcatggcgtagagagcaaaaagggcggtataaataattccgacaaatgccagattgatatttgcccgctgaataactcgcctcgtgatgagcgtcaaaataaggctggcaatggcgcagaaaaaccagctgggataataagcgccgatcaccgggattgccggagataatgagcatcccgaaaccatgaagacgggaattatccaggctgtttttttgagttgcatcgccatgcgagagagaactgttggcatattaaatacatcctgtctgctgcgaacaatatctgtagtgaatatcaatatccattgaaggcgtcagtatggctattttcttgatgaataaaaatagctttattcagccaccgcattcataacttatatattttatttattaattggctgtatatatttttaaaataaatacttttgggggcttcagcgcccccaaaagcgagtgacattaatttggggttacgatattcacccacaaatcgaaattatccagacaggcgataatttcttccagtttcgcgccattgccaataattttggctttcttcgcttttaccagatccgccattttggcttgtccggtcagcacggcgtgcagatcttcacggctgatgtagaaagaggcgtcggcttgcggttgcagcgttttccggtagttaagcacgctatcgttcagcgtcaggttgaggttatcgccgttgctcatattgaagttcaggctgatatttttacccgcagctttcgcgctatcgaggcgaacggccataaagtcgaacagcatttcgacgctcatcccgcgaatggtgtccggggaaccggtggtgccgtggctgaacttatgcaccccttcgcgcagctctttcgcgccggtcaggtagaaaccgcgccatgtggcggactcggcctgatagcccagctgttcaaagttattcgcttgcagattcttcgcgacctggtcacccgggttggcggcaatcacctgtttcagcagttctgcgctccagcggtaatcaccttgcttgttcgcttcttgcgccaggttgatgacacgggcagaaccgcccagcgcctgcacgtaacgtttacccatctccacctgaccatacggatgcaggttagccgggttaccgtcgtaatagccaagatagaagttatacaccgcgcgggcgttgtggctgacagaaccgtaatagccgcggctggcccagttattggcaagtgcaggcggcagcttaatcatgtcgccgatttcattcatggtgtagccctggttcgccaggtgcagggtctggtcgtgaatgtacttgatggtatcgcggtatttaccaatataatcattgatatgcttattgccccagaccggccaggtgtgcggcataaacagcacttccgcgtcgttaccccacatatccagcgtttcgttcagatactcggtccacttgctggtgtcgcgggttttcgcgccgcgcagagtgtagaagttgtgcagggtatgcgtggcgttctcggcggtacacagggctttcagggccggaatatagaagtgcatttcggctggcgcttcgctacctggggtcatcaggaagtcaaactccaggccgtcgataatcatcttctcgccagttctgacgatagttttcgtcggtgcaataatgctcgggtcgcccgttgccagcgtcacgccaaggccattacccacattgccttgcgcgttgtgcggcagtaacagaccgtaagagtagagcgcacggcggctcatgatgttacccgccagcacgttttcgctgatggcttcgtccataaagcctgcaggggcaatcacctgaactttgccggatttaacatcggcttcagagataatgcctttcacgccaccatagtggtcggtgtggctgtgagtgtagataacggcaacaatcggtttttgcggacgatgctggaagtaaaggtcaagtgcggcttttgcggcaggcggcgtcaccagcgggtcgataacaataatgcctttctcgccctcaacgaacgtaatgttagagatatcctggccgcgcacctgatacattttatcggtgactttgaacaggccagaaataccgttgatttggctctgacgccacaggctggggtttacggtttccggcgctgcggcattaatatcaaatttgtaatcgtccgcgcggtagtaaactttaccgttcgcatcacgcagaataccttcatccagcagcggggcgataaatccacgctgggcatcgtcaaaatcctgacgatcgctaaacggtaaacttttggcgtaattctgattaacctgttgggtatattgagtggcggctttcgcttcctctttcgcgttagcggtatttaccatcatgccgctggcggcagttaacgcaataacaatcctgctcaaacggaataaccgagagttattcatataaatctccatttatcatttatgtcgtaaatatgtaatccatgcaaaatacgtcatttaaagctggcgttatcataattgggaaattgcgactttaataagtggaagtgtgagcggaacgcgccattttattaggcatttgtgctgaagagggaaaattacagtaaaactatcattgcagaaaataatatgagtcgttttatgtgtttattatatatattgtacctgtcgttggcacagcgggacattgcgctactgtgccaacgttttactcatggggctttagcacagaactgtggcaaaaaacgttgatgcgccaatattgctgcaccctgagcgccattaaagtcagaagaactggcggcaataaagcgcacgacctgatgcggcagtggacggcgcaggtacttttgggtcatggcaacgagagtctcgcgtgggaaggcgggcatatccatcacgccaccgcccaggatcaccgcatcgggatcgaacagattaatgctggtggcaatggcccgtgccgcgttttcaagcagactctggacgaaaggggcgttttccgcatggacgaaaagatcgcgcaatgggtaatttcggggctgttgttcgtaccagcgtcttagcgccattccagagcaattggtttccaggcacccaggattgccacacgcgcagtgttgggtcatatctcccagggggatatgacccagttcgcctgccacaccgtgtgcacccgtccacggcgcaccgttcatccacactgcgaaccccatccccgtaccgagataggccgccagaaccagttgttgcgtaaggcggttttctactacgtcccaggagagttgcaggttaacgtcgcgggaaaactcaaccggacaattcagcgtattttcgagcttatcggcgagatcatataaatccgccgctgttaacggcaggttaggcgtagaaataatggtgcgtttatctttactgaccagcgccggaaatcccatcaccagaccatgacagcgagcgttaaagcgcctgagttgctcgtcaatcatttcgccgataccgctcaccaggccgggagcaatgacttctgcggtccgctttttttcgcagtgtagcgtttcaccttctgctgtccgcagacaaaagcggatatgcgttgcccccatatccacgcccgctacgacgttatgctgtttttgcatgaggctgtacctcgctttttgcagccagaatctgcgcggtcataattctccatgcttcgtcgatattttccgcatgattaaacaggccggaagtgccgacgataaagacatccgcccctgccgccatcagtttttcgtaagttgcctggttgcaggaaccgtccacctcaatttcgtactccagaccttctcgttcacgccatgccttcagttcggcaagtttatccagcatttcaggaatgaacggttgtccggcaaagccgggatcgacagtcatgaccgtaattttatcggccttatggatatagtatttcatggcctcaactggcgtctccgggttaaggatcagccccactttcatgtcatgacggcggatttcatcaatcaggcggaacgcctggccgttgatggtttccggatgcagagtgatgaaatctgctcccgcacgcgccagttgagcaatgtaatcctgcggccgcgtcaccatcagatgacagtcgagcggtttagttgccagttttttaacctgacttacgaagaacggactgagtgtcagattggggacaaagtgaccgtccatgatatcgatgtggaagtaatcggcatggctgtcgataaattcgatctgttctttaaatttcagcagatccatacacattaagctgggggagattttcatgttcaattccttacttactgataagacggtcaagggcgacagccgcgataattaatccgcccatcaccaccagttggtaataggtttgtacctgcaaaatattcagaccgttgttgatggtgccgatgatcaacccgccaatcaccacagagaaaatgcgccccttgccgccgaagaaactggtgccgccaatgatggcgctggcaatggcataggtttcaaaacccataccggcaagcggttctgcggcaccgagtcgtgcagtactgacgacgcctgccagacctgcacaaacaccggagatgataaacaccaccaggatgtggaatttcacgtcaatcccggaatagaacgcgctatttttgttgccgcccagtgcgtagatgttgcgcccgagccgcatacgcgttgtcagaaaccaaaggatgagcgcgacaattagactgaagataacggggacaggtatcccaattacgctggcggcaaagaagttcacgaagtcaaaactgaagccgtatacgctgttggcatcggagatcaccagcgtgatcccacggaaaatcgcgttggtgccaagggtgatgatgaacgggtgtagccccgtccagttgaccaggcagccgttgatcgcccccagtgcgccgccaaccagtacaccgccaatcatcgctgcgagaaacgggtcaacacctgccaacatcagtttggcggtcaccataccggaaagcgccagaatcgcgccaacgctgaggtcgataccagcgaccaggatagcgaaaaactcgcccatgccgatcaataccgtcacggagctttgaacaaaaatctgggtaatattattggtggtcagaaaatattctggactcaggctaccaaagatggcgacgatgatcgccaggataaaaaaggtgccgtatttatcccagaacagcgcaaagttgaacggtttcttctcgctcgcttcgctttttactcttgtggtaaagcccatgccataatctcctcttcgctcatgtcatcgcgattcgtcaggatttgcgtcagtcgtccttcgcagaacacggcgatgcggtcgcagacggtgataatttcaggtagttcagaactcaccatcaggatgacttttccgtcgtccgccagttggcgcatcactttgtaaatttcggctttcgcgccaacgtcgatgccgcgggtaggttcatcgaaaataatcacttccgggcaacagcacagccatttggagatcaggactttctgctgatttcccccggagagttcggtgatattctggtttacgctatgacatttcagcgccagcagttcgcgttgattttcagcggtacgttgctcgtcaacttcatgaaacaagcccatcgcgcctttatagccgccgtctttcagactgcggctgatcgccatgttctgagcgatggaaaagttggggaaaaaaccgttatcccggcggctttcagtgatgtaagccatcccttttttcacggcatccaggggactacgtggagagatatctttgccattaagacggatttctccgccagcgcgtttatccacgccaaacagacaattcatcagttcagtacgtccggaaccgaccagtccggcaaagcctaatatttctccccggcagacgctaaaactgatatcccggaccttttttctgtcacgactggtgacgttccgcacctcaaaaaccgtttcgtgcgcaaggttgctgacattctccttcatcgcgttaaaacggttttgcagttcgcggcctaccatcagacggacgatatcgtcattactcacatcgcttactatgccgctgcaaacgctgctgccgtctttcatcaccgtatagcggtcgcaaatacggcgaatttccgccaacttatggctgatatagacgatggccgtaccctctttacgcaactgattcatgatcagaaacagatagtccacctctttattggtgagactggaggtgggttcatccatgatgatgactttggcatcgagcatcagcgttttggcaatttctagcatctgcttgtggctgatagataaattcgccactttctcatctagatcaactttcaagcccacgcgtaataacatcatggcggcgcggacacgcatttctcgccagtcgataatattgacgccacagatttttttcgtcagatgacgaccaatatataaattttccagtacggttaattcatcaataacgctgagttcctgataaataatcccgataccgagttgtgccgctaatttatgatccagcttgttatagctaatgttattaatggtaatggtgcctttggtcggctcatgtattccggataaaactttcattagcgtggatttacccgcgccattttctcctagtaatgcatgtatttcaccaggataaaccgttaaattaacgctctttaatgcgtgaaccggaccaaaggacttgccgatccccgccatgcttatatatggcgtggccataaataacctctctgcacgaaatatcgtattattgcctgatggctacatttatcaggtctacgttcaggttattttgttggccggataagacacttcattagcatcatcatccggcatcattcagttttattgagtgaccaggatactatcgaccagtttaaattccggtgctttatccagcgggataaccttgccggatttctcagcgtcaaccatcagcttcagacccgttgcgccgatatccgccgggttctgggcaaccgtcgcggtcatttgtccggcttccaccattttgcgggcttccggaatgccatctgtaccgacgaccagcacttttcccgtttttccggcgtttgcgactgcctgagcaacacccattgccatcgtgtcattcgcgcaatagatcgctttaatattcggattacgttgcaacacgttagtggcgacatccagtgctttaatgcggtcccagtcggcaggctggctggcgacaagcttgatctggcttgcttttttgaaggcttcggtggcaccattacgacgcgcttcaccggaggcgttaccggctttaccctcaatgattgcgacttcaccaccttcagcgcccaatttgtcaataatgaagctcgcgcctttcgccccgacagcaacgttatcggtggtgacaaaagcttccacattgccgccagcttttttcagattatccatgtcgattttttcatcgagattaaccagataaatgccttttttccatgcgcgggcgacaggcatgaccagattcacactggataatggagcgaaggcgatacctttgtaatttttattactgagatcttcaaataactgcaattgagattgaaaatcgccttcactaggagaggcaaaaatatcaacgctgacgcccagtgtttttgcttcatcttcaatgccttttttcatatctacccaaaatgggttggagagggttttcaatacgacagcatattcggcggcagcaaaagcgctggtactcaacattaagcccacgagtgtgccgctgaaatatttcagatatttattcataataatgttctcacggtaaggggacaggtaactccgcgatggcggaattacctttttcttatttcagcgcgcctggactgaagaaatcaacaattgcgccggttttttgcatattaatattagcttgttcaatgttgagctgggcgacagagacaaaaaaagcgtccagcaaagttagttgtaatattcttgcgctggcattacgacctaataacggcgtttccggggctggactgcaaataatataatcggccagtttcgctatcggactatggtagctatgggttatacaaataatctttgccccgttcttttttgccagttctacggccgcttttacatcactggttcgcccggaatgggtcactaccagcacaacatctccttcctgtaacaagctagcggacatcatcatgatgtgagcatcaggataggcctgacagcgtacgccaatgcgcaagaacttgtgctgtacatcagcacagatagcattacttcctccggcaccgtacaaatcccgctgtctggcctgatagaaaaagcgggcggcacggtggatctcatcaacgttgacgatgctctgaccttccataatggtgcgtaaagtgatgttaaataccttattcaccacatcctgcggcgcttcatcaaaagccaactcggaaggcaatacctgttcactctgagaaaaataatcttccagcgcactgcgtaagttacgaaagccgctaaaccccagcagcttacttaccttaactatcatcgcttcagataccgccagagcttctgcgacatctttaattgcgggtgcacaactcaggttaccgggtttgagtaaccactccacgatgcggctttcattttctgtcattccttcctgcttcattcgcaggtaaggcgctaaccctataccgttcggaagcgcactatcaaactcactctggctcatcacgttctcttgtccttgaattgaagacgccactatatcaccacagcaagaacagaaaagatgctggcgacttcacaaaaaaataaaatttataaagtttattttattgtgaacaatggcgagtggcttaaaattttatttcatttaattagtttaaaaacatgatgttatttgtttttctggttttttagatgatagatgttgctggatggtgagtgtctttaacgctattgcgctgtcagatgtaactctgtaaaacagatcaggaaggcgtaattcatcgattttgggtgtttttaattcattaacatcacaaatgttttttgattgtgaagttttgcacggacggggaagatgaatgaaaaagattgcatttggctgtgatcatgtcggtttcattttaaaacatgaaatagtggcacatttagttgagcgtggcgttgaagtgattgataaaggaacctggagcagtgagcgtactgattatccacattacgccagtcaagtcgcactggctgttgctggcggagaggttgatggcgggattttgatttgtggtactggcgtcggtattagcatagcggcgaacaagtttgccggaattcgcgcggtcgtctgtagcgaaccttattccgcgcaacttagccggcagcataacgacaccaacgtgctggcttttggtagtcgagtggttggcctcgaactggcaaaaatgattgtggatgcgtggctgggcgcacagtacgaaggcggtcgtcatcaacaacgcgtggaggcgattacggcaatagagcagcggagaaattgagattcatccactacttgcatggatgagtaatgattaatgtggatagagtttctttttgaggttggctaatgaaacgctttccgctatttcttttattcaccctgctcacgctgtccaccgttccggcccaggccgatattatcgacgacaccattggcaatattcagcaggcgattaatgacgcttataaccctgaccgtgggcgagactatgaagatagccgcgacgacggctggcagcgtgaagtgagcgacgatcggcgcagacaatatgacgaccgccgccgccagtttgaagatcgccgcaggcagctggacgatcgccagcgccagcttgatcaggagcgtcggcaactggaggatgaagagcggagaatggaagatgagtatgggcgatgaggttgggtatggagcaggcatcgcccctcaccccaatggggagagggagaaaacgagcgcaatattcaatatcgagcacaatcggtcccctcgcccctctggggagagggttagggtgagggggccagcgcgcacattccctctcatcacgccaccccaatctccatcccatcaaaccccacctcaaacccactcggtagtgcgttttccatcagccacgcatcaaactggtggctgatatgggtcagaatcacccgtgggctgcggataacctgattcagcgcaagcacggtatttaaatcacagtgattacgcggtgcatccgcgcgcggcgggtgactgcaatccatcaccattacctgcggctgattattgcgtaaaaatttcagcgttttttccggcaagcctgcggtgtcagacagccacgccacccggctgtgtgccgtttccagcagataaccgaaggtcagtttactgtggttgagcggcaggggcgtgacctgtaacccctgcaaatcaaacaccacaaacggttccaccgtgtggctgaaatcaagcaggcccggatgtttaaacagatcgtcgcagccctgttcatccggcgggccgtaaaccgggatcggatcgccaacgccccagcgcagcggaaacagcccctggacgtgatccatatgataatgcgtcagcaaaaactgctggaagcttccggggctccagcgatcggcgagatcgtgcagcccggcgtcgatcagggtgattgcgtcgttaaacttcactacgccgctgcacggttggcggcgatactgcgggctgcgccgcgctctggcgcaggccgcacactcgcagccccatgccggaacgccctgtgcgccgccggtgccggtgagcgtgagggtcaggctcatgttacagcgccttggtgaagcggaagtggctctgctcgtagccttcgcgcagatagaaacggtgcgcgtcgtggcgcttcacgttggtgctaagttcggtcatttcggccccggcctggcgggcttcttcttctgcccacgccagtaacttactgccgacgttcagaccgcgcgcctgcggcattaccaccaactcctgaatttcgccgatccagttgacatgatgcagatgaaactgcaaatgcaggccgatcatgccgacaacttcgccatcaagcagcgccagatggtagcgcatgtttgggtcgcgcagattggcgttaaaacccacgcgaaacgcgtggtggtcaaactccgcctgttttagctcacaaatcagcgcgtaaaccgcgtcggtgtcgtactgcgtggccgggcgaagctcacaagcaggcatggtgtttctccttctgatggatcagcgtcagcagcgtgtcgacgctctggcgcaggctgccgtcattgttgagcgtatggcaatcctgtggagtatagcgggcggcgcgcgccaggcgggcgttaatttcactggcgttttcacggccacggttttccaggcgctggcggaggatctccgggctaacctgtaaacagacgggcagcagcgcgctttgatagcgcgcccgcgcctgcggcagatgggcgcgactgccgttgaccagcacgtcgaatccggcgtgcagccagagatcaatctcgacgccgacgccataatacagaccgttagcgtgccagcttaaggccaacagattttgccccgcgcgggtaaaaaactcctgctcgctcagggcgatatggttttcacttccggcgctggcatcgcgcgtgatgtagcgatgcgccaccagtaactgagtttgttcccgcaggcggagttccgccagcaggctgtctttcccggagccggacggccccattaaccaaatcagttttcccatcatcagaacacccttttaccctgacgccagacgtggtcgatatgaatatgattgtccttgcgatgcgccagcaccaggtcggcgcgtttgccctcgccaatcaccccgcgatcctggagattaagcgcctgcgctggatttttagtcaccagcttcaccgcctgcggcagcgtaaagcggttgctctggtcatcggcgacgcgaaatgccgcatcgagcaggctggcggggtagtagtcggaagagaggatatccagcaggccaagctgcgccagttcactggccgccacgttgccggagtggctgccgccgcgcacaatattcggcgcgcccatcagcacgttcatgccatgcttgcggctggcttccgccgcttcgaacgtggtgggaaattcggcgatcacgctgccaagctggtgagattcagcaacgtgggcgtgggtggcgtcatcgtggctggcaagcgcaatttttcgcgcgcggcacagggcggcgatggattcgcgattcggctggctccagcgtgcggcgagcgccagttgctcttcttcgtactgctgcatctgcgcatcagtgagggagtatttgccctgataatattcgcgatacttctcgcggttggcgaactggcgctggcccgggctgtggtccatcaggctcaccagcgtcaccggctcgcgctgcaccagtttttcaaacagcggcagcgtggtgtgatgcggcagttcgcagcgcagatgcagacggtgctcggcgcggttgacgccgcgtttctgcgtctcttcgatggcgttgatcatcttctccagattctccagccgatcgccgccgtcgcgcacgtcgccaattgccacggcatccagtacggtggtgatgccgctcgccaccatcagcgcgtcgtggctgctcatcgcgctgtgggcaggccagtcaactttcgggcgcggggtgaagaatttatccagattatcggtatgcagctcaatcagccccggcagcagccagccgccttcgccgtccatcgcctccggcaggcggctctggctttcggcaaaggcgcggatttcgccgttctgcacctccaggctaccgcttaccacctcgttttccagcaccagcttaacgttattgataatcatgaagaggctcccattgggtgttagctcaactagaggctcccattgggtgcaggcggtcggcgacgtcattacgtacagcttcgtcatggaagatgcctacgatggctgcgccacgggttttggcttcgcgaatcagttccaccaccgcggcgctgtttttggcgtccaggctggcggtaggttcgtcaagcagcagaatggggtagtcgacgataaagccgcgggcgatgttgacgcgctgctgttcgccaccggaaaatgtgcttggtgccaggtgccacaggcgttccggcacgttcaggcgggtgagaagacgcgcggctttagcggcgcaggcttcacgcggaacgccggtatcgagcagcggctgcatcaccacttccagtgcactgatacgcgggatgacgcgcagaaactggctcacccagccgacggtggttttgcggatttccaccactttgcgcgctggcgcggtgaccaggtctacccactcgtcaccgtgtttgatctggatttgaccttcgtcgggcagatagttggcgtacaggctgcgtagcagagtacttttgccgctgccggaatggccgtggagcaccacgcattcgcccgcgttgacggtgaggctggcgcgattgaggacgggcaggcgcacgccgttttgctggtgcaggatgaaggttttactgacgttttgtacgttaatcatttttcgcctcgtggttcgggtgtcggatgcgacgctgacgcgtcttatccgacctacggggagcgcatttgtaggccggataaggcgtttacgccgcatccggcaccggctcaattctgcaaaacgctactcaccagcagctgtgtatacggatgatgcgggtcgtcgagcacgcggtcggttaacccactctccaccacttgcccctgcttcatcaccagcaaacggtccgccagcaggcgggcgacgcctaaatcatgggtgacaatcaccaccgcgaggttcagctccaccaccaggccgcgcagcaggtcgagcaggcgggcctgcacgctcacatccagcccgccggtcggttcatccataaacaccagcttcggatgcgtcaccaggttgcgggcaatctgcaaacgctgctgcataccgccggaaaaggtggtcggcaggtcgtcgatccggttggcgggaatctccacctcttccagccacttctgcgcggtggcacgaatatcgccgtaatgacgtgccccggtcgccatcagccgctcgccgatattgccgcctgcgctcacctggcggcgcaggccgtcgagtggatgctgatgcaccacgccccattcggtacgcagcaggcgacggcggtcggcctcgctcattgcatacaggctacggttctcgtagtgaatttccccctgctgcggcgtcaggcgcgcggagatgctcttcagcagcgtggtcttcccggagccggattccccgacaatgcccagcacttcccccggccataaatcaaaagagacatcgctaaagcctttgcccggcgcgtaaaggtgggtcaggttattgacgctaagtaacggttgattcattggttttttgcctcgctctgttggcggcaataatcggtatcggagcagacaaacatgcggtttccggcgtcatccagcaccacttcatcaagatagctgtgggtgcttccgcagatggcgcatggctcatcccactgctgaacggtgaacgggtgatcgtcgaaatcgagactttccacgcgggtaaacggcggcaccgcatagatgcgcttctcgcgccccgcgccgaacagttgcagggcgggcatcatgtccatttttgggttatcgaatttcgggatcgggctcgggtccatcacgtagcgcccatttaccttcaccggataggcgtaggtggtggcgatatgaccgaagcgggcgatatcttcatacagtttcacctgcatcacgccgtactcttccagcgcgtgcatggtgcgggtttccgtttcgcgcggctcgataaagcgcagcggctcggggattggcacctggaagataattatctgatcttcggtcagcggcgtttcggggatgcggtgacgcgtctggataaccgtcgcatcgtccgtacgttccgtggtgtttaccccggtcacgcgcttgaagaagttgcgaatgctcacggcgttggtggtgtcatccgcgccctggtcaatcaccttcagcacgtcgctttcgccaatcacgctggcggtaagctgaatgccgccggttccccagccgtacggcatcggcatctcgcgcccgccaaacggcacctgataaccggggatcgccaccgcttttaagatggcgcggcggatcatgcgtttggtctgctcgtcgaggtaggcaaagttgtagccgctcagattagccatggttctgctcctgttgcagacgtttgagtagctccagttcggcctggaaatcgacgtagtgggggagtttgaggtgactgacaaagcctgcggcttcgacgttgtcggcatgtgccagcacgaactcttcatcctgcgccgggcctgtcgcgtgctcgccgtactccggggcttgcagagcgcggtcgaccagcgccatcgccatcgctttgcgctcgctcatgccgaacaccagcccgtagccgcgcgtgaagtgcggcggctcacccggcgggtcgataaaaccgttaaccatttcacactcagtcatcagcagttcgccgacgttcaccgcaaatcccagctcttccggcacaatgctcacgtcgatatagccgctgcggatctcgcctgcgaacgggtgattgcgcccgtaaccgcgttgggtggagtaggccagcgccagcaaatagccttcgtcgccgcgcatcaactgctgcaaacgggaggagcgactgcaggggtaaaccggcggcgtgcgggtgatgtcatccggctgtgcgccgctatcctcttcaaacttcgccagcccctgacgcgccagcaggctgaaaacgtgcgggctcggctgctgttcgctgtcggcggtggtcagcgtcggcgcttcgccgtttgccagcagggtaaaatcgagcaggcgatgggtgtagtcgtaggttgggccaagcagctggccgccgggaatgtctttataaacggcggagatacggcgttcgagacgcatcccggtggtgtcgagcggctcgcttaccgccagcttcgccaacgtggtgcggtaggcgcgcagcaggaaaatcgcttcaacgttatcgccgctggcctgtttcagcgccagcgccgccagttcgcggtcggcaatgccgccttcggtcatcacgcgatctaccgcgaggttaagctgctgttcaatctgggcgacgctcagttcgggcaaatcggtatcgcctcggcgtcggctctcttgcagggcgtgggcggcgtcgatcgccttctcgccccctttcacggcaacgtacatcagcacacctccacatgagtggttcgcggaatagccagcaggcgctcgccacaggtcaggatcaggtcgatgccgagcgggaacggatgcgggcgctcggtgagttcgtgcagaatgcactccggcagctgcggagcgatcattcgttcttcggcaatacccgcaccagtaaggcgcaacatgcgtccgccgctcaggctggcgacctgtaaaatcagcgtcgcacccgcttccggcgcaacggcggtgccggtggaaagggcgttgagctgttcgctggaaatcgcctcatccgtcaccgcgaaggtcgcctgttccggctggctgaccagcggcgcgttggtatgaaaacgcaggctctggttgacgatatcgttatttaatggggtagaaagccacaccggcgtgtcgttatcggccagcgtcagcagcacgctggtggtggcgatattcagcggttgccagccgcgtttgagctgatgcagggcgacaatcacgcccggctcgctcatggcctttaacaggcgacgaaaactgtgctgggcatcctgcacgggaagcataaaagcggtttccagggtcatgcgttgtctccgcgaaccatcgtaaagaagtcgacccggctggcgttcacttcggcctggcgtgcggcaatgcgtgccatacggtcagcgtccagcggggcaataagggtttcacttaagttttgaaagtggcgagattgctgcatcagcgcgtcaatcagcgcgcagcgttcggcgtgctgtttatcacgcccctgcacccagctgtagccgagcgtgccgtcagtcaggcgcacggcggcgcgggtcagcgtggcgtcgccggcaaaaaaacgttcgccggtgccgcccatccgcgcctgaatctgtaccaggccagtttcagcggcgcggatcacctcatagtcggcggtgatgtttagcgcgttcaggcgtgctgccagttcagccggttggctgtgcgccagcacggacatccagtgctggcgggtcgcggtatctgcgtgcattcagtgctccatagtgaattcaatcatgtcggcgcgcgtcaggctgacggagtactccgccgggctgctttcaccgtcacggtggttaagggtgcgcacgcacagcagcgggctcatattcgggatttcaagacgctggcactctttggcctgggcgcggcgggcgctgatccgcgtctggctgcggcgcagcgcaattccggtttgctcgcgcagaaaatcgtgcaggctgccgctgtcgaagcgttgcagcgtcggccagagggtgaggtccgcgaagtagtggtcgattaaacagagcgcgacgccgttgacacgacgcagggtgcgcaggtggatgacgttctccccctcggtaatccccagtgcgtcagcgacgtggccggacgcggggcgcaatacgctaagcagtttttcgctggtgggatggctgccctgatccagcagattctggctaaaacgcgcctgggcgttgagcgggtaatcgaacgggcgcatcagcaccagcacgccgacgccctgacggcgctgtacccagcctttttccaccagttggtcgatggcgcggcgcagggtgtggcgattcacctcaaagcgcgctgccagttgctgctcggcgggaagatagtcgccgcagcggtagtgttgacgaagctcctgctcaagttttgcggctatctcttgatagcgtgttgggtagctggtcggatgtgtagacaagtgcatagatatcaatgcctcgcttatcagataaagtgcttacgcaaccgttgagagaggaaatccagcaggctgaccgtgacgatgataagcaccatcagggcgcaggtttgttggaactggaaaccgcgaatcgcttcccacagggtgacgccgatcccgcctgcgccgaccatgccgacgacggtcgccgagcggacgttggattcgaagcgatagagggagtaggagatcagcagtggcatcacctgtggcagcacgccgtagaggatctcttcgagcttgttggcaccggtggcgcgaatgccttccaccgggccgggctcaatcgcttccaccgcttcggaaagcagcttggagagcacgccggtggtgtggataaacagcgccagcacgccagcacgccagcgaacgggccgaggccgacggcgaccacgaacagcatggcgaagaccatttcgttaatggcgcggcaggcgtccatcaggcggcgaacgggctggtaaacccaccacggcaccaggttttcggcgctcatcaggccaaaggggatggagagaaccaccgccagcgcggtgccccagacggcgatttgcagcgtgacggccatttcggtgaggtaatcctgccactggctgaaatcgggcgggaagaagtcggcggcgaacgtcgccatgttgccgccgtctttgatcagcgtaagcggggccatttccgcgccctgccacgagacgaccaacacggcgagtacaacggcccagctcagaagcgagaaccagctgcgcttgggtggggcgatggtgatggtttgcatgtttggctccggtctgtaggccggataaggtgcttgcaccgcatccggcatcaacgcctgcacattgtcggatgcgacgccggggcgtcttatccgacctacgatttactgcaccgctttactcacgctactcatcgcgcttagcgcgttgttcaggcggtccaggtcatccagctgcgcctgaatctcggtggtttttgccagcttgtcctgctcattcagtcctttattgcttttcacgccctgcatctctttaaacagcgcgagctggcgaatcggcaccagttgcaggtcgctggaagcgcggaatggcgcccagcccaggcgttccagcaccgctttttcttccggcgttttgccgtagttcataaagaagtcgtagatcttgtctttggtggtttcggaaagattcttgcgccagacgatcggatcgcctgggatcagcgggctcttccagatcaccttcagttctttcagcttctctggcgcggaggttttcagcttgtcgaggttttcggtgttgttggtggcaacatccacctgcttgttggcgacggccagcgcgttggtttcatgcccggcgttgacggtgcgcttgaagtcgctggcggagatattgtttttggcgaagacgtagtagccggggacgaggaagccagaggtggagttaggatcgccattgccaaaggtgagatctttccgcttcgccagcagatcgttcaggttgttgatcggactgtctttgttgacgatcaacacgctccagtaacccgggcttccatccgccgcgaccgtctgggcgaagacctggccattggcgcgatccaccgcttccatcgcgctcagattgccgtaccaggcgatatccactttattgaagcgcatcccctggataatgcccgcgtagtccggggcaaagaaggcgttgaccttcacgcccagcttcttctccatatcctgcaagaacggcgtccattgcggtttcaggttttgctgactttccgtactaataatgccgaaattcaacgccttttcctgctcttcggcgtgcgccgggcttaacagggtgctgaggctgaacatgctggtgaaggccaggctggcaattatcttagcgttcattcgttttcctcaatgatggggatgtcaggcagctttcgcgttctcttcgacgcggttaatgctgcggtagagatggtcaaaacgttcgttatcaaactgttggctgctgccgtcgtagaagacgtgcccctggcgcagggcgacgatgcgttcgcagtagcgcagggcgtaatccacctgatgcagcgtgacgaccacggtgatgccgtcgttctggttgatgtcgcgcagggtgtccatcacgatgcgcgcactttctgggtccaggctggcgatgggttcatcggccagaatcactttcgcctgctgcatcagcgcacgggcaatcgccacacgttgctgctggccgccggagagggtggaaacgcgctgatgggcaaaatgcaccatgccaacgcgggtcagcgcctgtaacgcgcgctgtttctgctcgccggtgaaccagctaaaacaggtgcgccagaacggcgtgctgccgagcgcgccaatcagcacgttctccagtacgctcaggcggttcaccaggttgaattgttggaatatgtagccggtatgggcgcggcttttgcggatatcgcgggccaggcggccttcgcgctggactgtgcggcccagcagctcgatatggctaccgacagatttatcgccggtaatcaaaccgcttaagtgacgtaaaagggtggattttccggaaccgctcggcccaagcagagccaccatttcaccgtgatgaatgttcagatcaaccgcatgcagcgcctgatgctgattgaaggttttggcgagcttctcgacacggataatcgtttgcatgatgcagcctccctaaaaaagtggctccatcgtggcggattattgtgacgatttggttaattaaaagtgactaacagatgaagagttaacgggaattcgatgacagtgcgggagggcgggcctcccggcgggttattgcgttggttgttgtttgacgacattaatcatccacggtacgccaaatttatcggtgactttgccaaagccatgcgcccagaaagtttcctgccaggccatttcgatttttccgttagcggcaagattgtcaaaccagcgttttccttcttcgacctgttggctatcgagcaccagcgtaaagccggagtagctggcttttccactcggcatggcatcgctcatcatgatgtcgcttccggcaatgcgcacattggcgtgggcgatggcggtatcgggaaattgcattccggaagggcagttctcggcgctgtcctgcgcactttttggcatttcgccgaagctgattttatagagcagttccgcgcccaacgtacgttgataataggcaatcgcgtcggaacagttaccggcaaaagagaggtagggacttaacggcatgatggtgacctcagttaagagaagccagttaagtgtagttcgaaatttatacagatgagaggcggcctgataagacgcgcgagcgtcgcatcaggcagtcggcactgttgccggatgcggcgtaaacgccttatccggcctacggagggtgcgggaatttgtaggcctgataagacgcgcaagcgtcgcatcaggcagtcggcaccattgccggatgcggcgtaaacgccttatccggcctacggagggtgcgggaatttgtaggcctgataagacgcgcaagcgtcgcatcaggcagtcggcaccgttgccggatgcggcgtaaacgccttatccggcctacggatggtgcgggaatttgtaggcctgataagacgcgcaagcgtcgcatcaggcagttggcactgttgccggatgcggcgtaaacgccttatccggcctacggagggtgcgggaatttgtaggcctgataagacgcgcaagcgtcgcatcaggcagtcggcaccgttgccggatgcggcgtaaacgccttatccggcctacggagggtgcgggaatttgtaggcctgataagacgcgcaagcgtcgcatcaggcatctggcaccgttgccggatgcggcgcgagcgccttatccggcttaccgatcacaatacaatcagttctttttcacaaactcagatttcagtttcatcggaccaaaaccgtcgattttgcaatcgatgttatggtcgccttcaaccaggcggatgtttttcactttggtgccaattttcagcatgctagagctacctttcaccttcagatctttaatgatggtaacgctgtcgccgtcagccagcagattgccgttagcatctttaacgatcagctcgtcgctttcctgtgcaggttctgcgtcgttccattcgtaggcacattccgggcagatgtacatgccgttatcttcgtaggtgtattcggagttgcattttgggcagtgtggtaaactcatgtggatttcctcaaaagtcagcagggcaaaagcgccaaaaaacggcagattgccgaaaaaggccgcaattatacacaaaatccctgagtttgtcgggggtactgctgattttagacgacgatcgttttcatttgaaaggaaacgcaaaaagaaaataatctttttgcctctatttattatttaagataatgttaatgctctacttgttctttttttaattcacatgatatttttatctttctgacgttttaaacgtatcagaagacgttatttattctgataaaaaacaacacactaaatataaaattatttcttgcagtaattataaaagccgaaaacagaactcaaaaacaatctggctaaataaaataacaaaatttgctttaaggaagaattttctatgtacacacagaccctgtatgagttaagtcaggaggctgaacgcctgttacagctttctcgccaacagttgcagttactggaaaaaatgcctctctctgtacccggagacgacgcgccacaactggctttaccctggagtcagcctaatatcgccgaacgtcacgcgatgctgaataatgagttgcgtaaaatttcccgactggaaatggtgcttgcaattgtcggtaccatgaaagcagggaaaagtaccaccattaatgccattgttggtacggaggttctgcctaatcgtaatcgcccaatgactgcgctgccgacgcttattcgccatacgcccgggcaaaaggaaccggtactgcattttagtcatgtcgcgccaatcgattgtttaattcaacaattacaacagcgcctgcgtgattgcgatattaagcatctgaccgatgtgctggaaatagataaagatatgcgtgcgcttatgcagcggatcgaaaatggcgtcgctttcgaaaaatattatctgggtgcccagcctatttttcattgtctgaaaagtttgaatgatttagtgcgactggcgaaggcgctggacgtcgattttcctttttctgcttacgccgccattgagcatattcccgtgattgaagtggagtttgtccatctagcggggctggagagttatcccggtcagttgacgttactggatacccccgggccaaatgaagccgggcaaccgcatctgcaaaaaatgcttaaccagcagctggcacgcgccagcgcggtactggcggtgctggattatacgcaactgaaaagcatctccgatgaagaggtccgtgaggcgattttggcggtggggcaaagcgtgccgctgtacgtgctggtcaataagttcgatcaacaggatcgtaacagtgacgacgccgaccaggtgcgggcactgatttccgggacgctgatgaaaggctgtattacgccacagcagatatttccggtgagcagcatgtggggctacctggcgaatcgggcgcgctatgagttagccaacaacggtaagttaccaccgccagagcaacaacgctgggtggaagattttgcccatgccgcgcttggcaggcgctggcgtcatgccgatctggcggacctcgaacatattcgtcatgctgccgatcagttgtgggaagatagcctgttcgcccagccaattcaggcgttgcttcatgccgcttacgctaacgccagcttgtatgctctgcgatctgccgcgcataaactgttgaattacgcgcagcaggcgcgggaatacctggattttcgtgcgcacgggttaaacgtcgcttgtgaacaattgcggcaaaatatccaccagatcgaagaaagtttgcagctattgcaactcaatcaggcgcaggtgagcggcgagattaaacatgaaatcgagctggccctgacctccgccaaccactttctgcgtcaacagcaagatgcgctgaaggtgcagttagccgccttgtttcaggatgatagcgagccgttaagcgagattcgtacccgctgtgagacactgttacagacggcgcagaacaccatcagtcgcgactttacgctgcgttttgccgagcttgaatccaccctttgccgggtgttaaccgatgttattcgccccattgagcaacaagtcaaaatggaattgagcgagagtgggtttcgtcctgggtttcattttcctgtttttcacggcgtagttccccacttcaacactcgccagctgttcagtgaagtcattagccgccaggaagcaacggacgagcagagcacgcgtttaggcgttgtgcgtgagacttttagccgctggttgaatcagcccgactggggacggggaaatgagaaaagtccgacagaaacggttgattacagtgtgttgcaacgagcattaagcgcagaagtcgatctctattgccaacaaatggctaaagttctggcagagcaggtcgatgaatctgttacggcaggcatgaatacttttttcgctgagttcgctagttgtttgacggaattacagacgcgtttacgcgaaagtctggctctgcgtcaacaaaatgaaagcgtggtcaggctgatgcagcagcaattgcagcagactgtgatgactcacggctggatttacaccgacgcccagctgttacgcgatgatattcaaacacttttcacggcagaacgatattgaccaagacgttacttgacggccccggtcgcgtgctggagagcgtttatccccgctttttagtggatctggcgcagggtgatgatgcccgccttccacaagcccatcagcagcagtttcgtgaacgactgatgcaggaacttcttagccgtgtgcagcttcagacatggacgaacggcggcatgttaaatgcgccgcttagcctgcgtctgacattggtggaaaaactggcgagcatgctggatcccggtcatctggcactgacgcagatcgcgcagcatctggcgctgctgcaaaaaatggatcaccgccagcactctgctttcccggagctcccccagcaaattgccgccttgtatgagtggtttagtgcccgttgtcgctggaaggaaaaggcgttaacgcaacgaggcctactggtgcaggcaggtgatcagagcgagcaaatttttacccgctggcgtgctggggcgtataacgcctggagcttgcctgggcgctgttttatcgttctggaggagttgcgctggggggcatttggcgatgcctgccgtctgggaagcccgcaagcggtggcgttgttgctgggtgatttgctcgagaaagcgacacaacatctggcagagagtatcaatgcggcaccgaccacgcgtcactattaccatcagtggtttgcctctagcaccgttccgacgggcggggagcatgctgattttttaagttggctgggaaagtggaccacggcagataaacaacccgtttgctggagtgtgacccaacgctggcaaactgtcgcgctggggatgccacgactctgtagtgcgcagcgtctggcgggggcaatgctcgaggaaatcttctctgtaaatttggcgtaaataatcagttacatcaatgagtcctaaacgaaatccatgtgtgaagttgatcacaaatttaaacactggtagggtaaaaaggtcattaactgcccaattcaggcgtcaactggtttgattgtacattccttaaccggagggtgtaagcaaacccgctacgcttgttacagagattgcatcctgcaattcccgctccccttttgcggccgtcgcgctgatttttctggcgtttgcggaaatgggccaactctgcgaggaaagctatgctgaaaaggaaaaaagtaaaaccgattacccttcgtgatgtcaccattattgatgacggtaaactgcgtaaagccattaccgcagcaagtctgggtaatgcaatggaatggttcgattttggtgtttatggttttgttgcttacgcattaggtaaagtttttttcccgggggctgaccccagcgtgcagatggttgctgcacttgccactttctccgttccctttctgattcgaccgcttggcggactcttctttggtatgttgggcgataaatatggtcgccagaagatcctcgctatcactattgtgattatgagcatcagtacgttctgtattggcttaataccgtcctacgacacgattggtatttgggcaccgattctgctgttgatctgtaagatggcacaaggtttcagcgtcggcggtgaatataccggggcgagcatatttgttgcggaatactcccctgaccgtaaacgtggctttatgggcagctggctggacttcggttctattgccgggtttgtgctgggtgcgggcgtggtggtgttaattagcaccattgtcggcgaagcgaacttcctcgattggggctggcgtattccgttctttatcgctctgccgttagggattatcgggctttacctgcgccatgcgctggaagagactccggcgttccagcagcatgtcgataaactggaacagggcgaccgtgaaggtttgcaggatggcccgaaagtcagctttaaagagattgccactaaatactggcgcagcctgttgacatgtattggtctggtaattgccaccaacgtgacttactacatgttgctgacctatatgccgagttatttgagccataacctgcattactccgaagaccacggggtgctgattattatcgccattatgatcggtatgctgtttgtccagccggtgatgggcttgctgagtgaccgttttggccgtcgtccgtttgtgctacttggtagtgttgccctgtttgtgttggcgatcccggcgtttattctgattaacagtaacgtcatcggcctgatttttgccgggttactgatgctggcggtgatccttaactgctttacgggcgttatggcttctaccttgccagcgatgttcccgacgcatatccgttacagcgcgctggcggcggcatttaatattagcgtgctggttgccggtctgacgccaacgctggcggcctggctggtcgaaagcagccagaatctgatgatgcctgcctattacctgatggtagtggcggtggttggtttaatcaccggcgtaaccatgaaagagacggcaaatcgtccgttgaaaggtgcgacaccggcggcgagtgatatacaggaagcgaaggaaattctcgtcgagcattacgataatatcgagcagaaaatcgatgatattgaccacgagattgccgatttgcaggcgaaacgtacccgcctggtgcagcaacatccgcgaattgatgaataagctgaaacggatggcctgatgtgacgctgtcttatcaggccaattgaactcttaaggttcacttaatctctgacgcgcatactctcctccaggttaacggaggagagtgcaatgaaaaaccgtgtttatgaaagtttaactaccgtgttcagcgtgctggtggtcagcagctttctttatatctggtttgccacgtactgatctttcttcagccgtacccaggcccgcgtgccggaagtctcttgccggttttgcaggaaaaactgcccgtgatgcaactgtgtaatgcggctgacaatacttaaccccagaccaatcccgccataacggctgtccatacgtacaaacgctttactcaactccccgcatttactctcatcaatacctggtccttcatcttcaactgccatgaccgctccgtcatcttcttgcagcttaatcataatgttgctgccttgcgggctgtaacgatgggcgttttctaccaggtttcgcaataacatccgcagcagggttgcatcaccctgaacggtgatgtcggcggcgctctctggcaatagcagggtttgctgtcgctggtcgagcatggtactgagttcgtcatagctggggagaatgacatcttccagcagttttacatgttgataattaccggaagaaaaactctgtccggcacgcgccagttgcagcagctgggagacgctctccatcatctgatcaagccgtgccactaacggtgctacatcaatgtgatgcgttttcgccagcagttccagatgcaaacgcacccccgccagtggcgttcgcagttcgtgcgcgacgtcagcggtaaacaacctttcgttatccagcgtgctggtcaggcgactgaccagatcgtttaacgcgctaaccaccgcttcgatttcgagggtggcgctgtgaatggcaatgggcgttaagttgtcggcggtgcgcgcttccagctctttttgcagctccgccagcgggcgggtgatgcggcgtaccgcctgatagcagataaatagcgtcaggctgaccataaagacgccggggacaatcaggctggcgaccgcctcgcggatctcacgcatgatgtggcgatcgttgttgcgattgtcgcgtagcgcctgctcaaacagctgaatctgctcggtactttcatgccatagccagaagacgctgatcagctcaaacaccaacaaaatggccccgatggtcaatatcagccgttggcgcaggcttattggtcggcgcagaaaatgcatcagattcaattagttttcctcattcgcgaccagcatatagccaaagccgcgcacggtgcggatacgggctttgcccactttgtcgcgcagattgtggatatgcacttccagggtgttggtgctgggttcattgtcccagttatagatgtcgttgtagagaatttcccgatgcaccggactgcctgctttgagcattaaccgactcagcagagcatattctttgggcgtcagaatcaactcttcaccgcccatccatacctgacggcgacccatgttcagcgtcagattgccaacaatcagctcactttcgccctgattattatggcgtcgtagcagggcgcggatacgggcatgtaactcttccagcgcaaaaggcttcaccagatagtcgtcggcaccgacatccagcccggcgattttgtcggtcagcgtatcgcgagcggtgaggatcagtaccggcagggtatattttttctgccggatacgggcgagaaaatgcagtccatcttcgtcgggtaaccctaaatccagtaccaccaggctgtaatgacctgcctcaaggctttgttccgccatccgcgcggttgtcacgctatcgcacgcgtagccttcggtttgcgccgccagaatcagtccctgcaataacagcgtatcgtcttcaacaatcagaattttcattcactcactctcctgcaagtttgcagaatatcatccgcagcctggtaatacttcgtctcaacgccagttaatcccaatagcgtggagaataaattgtcttgactatagtgttgcgtttgcgcctgtttttgcaggcagttctggtcaacctgataccgtttttgataatcctcgctcagccacagcagcatcggcacctgtttttggctatccggggcgatggcataaggcagaccgtgcagatagatgccattttcacctaagctttcaccgtggtcagaaagataaaccaggctggtggtaaatttatcctgatgttctttcagcagattaatcgctttatcaacaatatagtcgacgtaaaccagcgtgttgtcgtaagtgttcaccagttgctctttggtacaggtctggatctcattggtgtcgcaggttggggtaaatttcctgaactgaggcggatagcggttgtaataggtcggaccgtggctgccgatggtgtgtaagacaatcacgccatcaccttgcaggttattgatgtactcttcaagcccgtggaacagcacttcgtcatagcattcgccgttgatgcactgatcaggtagattcagcgcggtgacgttctggtgaggcacgcggtcgcaggcacctttacagccgccatcgttgtcattccacagcacgttgatgcccgctcgctgaatgatatccagcacgccttcctggtgctgtgccagctcttctttgtagtgctcacgcggcatatcgctgaacatgcacggtacactaactgccgttgccgtgccgcaagatgcggtattagggaaatagaccacgttatctttcgccagccgcgggttagtttcacgcgggtagccgttgagggagaagttctccgcccggctggtttcgccgacaatcaggatggtcaaatttttacgtttttcgttctgcattaacgggttgcggtgcgcgtcttcaccaattcgcaccagcggcagatttgccagtcgctgatgggagtaccaactccagctggcaacaatgctgttagaggggcttaaggatttcaccagctctttgttattgcggaacaagctggcgtagtctttataaaacagtgcggcgaccagcaaaatcagtagtacagaaaccagaatattggctccacggaaaagaacactgcgcagacggctggtggcaggtttgatttttatccagcaggcaatcagcgcagcaagcacgccgctgaatcccagcgttaataacatttgcggtgtcatcagcgcataactttctgccggagtggtatcaataatattggcaatcatgctgcggtcgatgacgatgccgtaagtcattatgaaatattgtgcagccgcgccaaccagaataaacaggcaggccagtggtcgattaagccataagaaagagcttagtgtcaggacaatattaatcacgctgaaagcgacgaccggcatgctcaagaaaaccagtacgttatgcaggctatccagcggcagcgcctgcaacacctgtttaaaaaaggcaatattcaggcagatagagatataaaaagcggccaacaatagccaggcgagtaaattcaaagagggtctttttagtaggcgcttcaacatcacggtgtttccatcgaacaaagtgcgcatatgctcgcaaagcaaaattaagccaaccttaagttcttaaggttggcttttatgtttgctggattaaggggaattaatctttgcttattggtgcatctaagggatacgggtttttatgtagccggttgtaattcagcgcatacatggcggtgatgaccatcagggtgacaaaactccacataacctctttcgctccggaccccaccacggcccagatgcagtagaggaaggcaatggtagtaactgccagatatgccgggcgtgctttaccaaagtgaccgtgtccgagcagcagtaacgccgcacaggtgtaaagatatggcaccagtgtaaagatgacgctgacggaagaaaccagaccgaactctttggtcgcgtttggactaatgctgctgagctggaagatggtcatcaaaataccgacgataatcagccccgccactggcgtacccgctttatttacacgggcaaaaatcggtgggaacagtccgtcatcggcagcggctttcgccgtttgacccgccagcaacgtccagccgcccagactacctaagcaacccgcagctgcgcagaaggaaacaatggccccggcggtgtcacccaacgccatccgtgcggcatcaccgaatgggctagcagaaacgcgcagtgcggcattagggatcatccccataatcgcggtggtagaaagtacatagcaaacggcggcaatcaataccccaccaatggtggcgatagggacattgcgtttcgggtttttcaccacacctgcggcaacggaggcactttccacaccgatgaagctccacagcgtaacgttaagggtactttgaattgcaccgaaggtgcccaggccgctgacgttccatgccgccatataggtttcaccacggaaccagaaccagccaaatacggcaatcccgacgatggggatcagcgccagcacggtggcaactgcctgcacacgggtgatcattttcggaccgacaatgttcagcaggacgaagatccacagcaccacgacgcaggtgatggttaataccaatggatctttcagaatcgggaagaagtaacttaaatatcctacgccaatgaccaccatggcgatattgccgatccagcaggccagccagtagaggacgttggtttgataaccgagaaacgggccaaagcagcggcgggcgtaagcgtaagaaccaccaggacttgggtcgaggaagctcattttggcgtataccatgctgagccccagtgcaccgataatcgtcaccaaccatccataaatggcaatcccgccagtagaggccaggtttgcaggtaacagaaaaacaccactccccataatattcccgctcaccatcagggtgacggggattaagcccactttgtgagcatcagcatcgctagacataattaaactcctgcgaaggcgagcttcgtgacaataaattacgtcatatcatacgcctgcattcgatagttgaattattatcgaccgggttatcgctgatgccgttattaatatagctcttcgttaaggttaaaaatcaggcgacagtgcgttctctgtgctgactaacataatgcagcggcgtcataccgtagaagtctttaaagacagaaataaagtagctcgtactgttgtagccgcaggactgacttacctgagagatatttttaccgtccatcattaattcatttacggcataacgcatgcggcaggtggtgattatttggctataactggtgttttcgcttttcaactttttctttaacagacttgggctaagacataaacaactggctaccatactaagattccagtctttgtgaatatcgctttcaataatttgataaacgctgtcacttacacaattacgtaacatatacatcattaaactaacgaattttttactgtcgagaaaacgggatagcaccgtgaataataatgcgcgtgttcgttccttttcactctcagtttctgcgggcatcatgctgtgttgcgcggcaacgcgaaagacgtctggcgtcaggcatggcagggtgagtatgggcgtagcgctacgttgccatactggtatttggctgagatctttattcagaaaccggaggtaatctttgatgatgtcgtgactaatatgagcaaccaaagtgttgttaagagaggagacgtcgataatattattttcacaatttaataacgccatatggttagctttaaggctaataggttctttcccattcacccttatccagacatctttttcagtcaataaaacaatacaaggttggtcgctgcaaatcctcatacatgtactcctgagtgcgaataaaagaccagttctcgctaaagcaaagcgataccgggaaatggttatataattgtatgatgaatataaacatgcataaaaataacgagttttactaatagtacaaatttttatagtaatttctcatgtacatatttttttacaggataaataacaggcaaaaaaaagcgcggggtggggccgcgcaaaaagtatgacatttttgtttgcagcaatttttatgaaaacgttgccatactcaaaaggcctaaggccaggcggcgtaatgttatttaaacaattacgccttcagcggaatagtggttacgctttcacgcacataacgtggtaaataccgtcaataatttcagtcccttcagtttcgtgttcaaatccagggaaatggtggtcccaggattgcaggctgcgtaaataacttacttgcggactgtttttatcgccgaagttttcaccagacagcagcatcgggattcctggcggatacgggataacactgtttgccgcgatgcgtcctggcagattttcaatggataccagttcgacattgttgtcgacaatcgcgttgtacgcttcacgcggggtgacttccgccaccggcaggccggaataggcttcgttcaaccgtgcgccagggttgttttctttcagccaggcaaacatggtgtcacccagatcgtgaatccccatgttcgcgtaagtgtcaggatattgttcaacaagttccggcatcacctgcgccagcggtgtgttggcgtcatagtggcgtttgaaggagcaaagggtgttaaccagagttccccatttcccacgggttacgcccatagagaacaggaacataatttggaagtcagtggtgcgggtaggtacaatgccgtggcgaccaagccaggcagtgaccagcgccgccggaacaccggtttcttccagttcaccatcttcacccattcccggagcaaggatgctgactttaatcgggtcgagcatactccagttatccggaatatctttgaagccgtgccagctttcgcccggatgcattacccagcagtcctgaacggtggtcagcagtttggttggtgcgtcagcaaagtcataggttttgccggtttgtgggtcggtgacgacttctttgttccacggtttgaagaaccagctaccgtcagcggtgaactctttatatagccgcgccatcgcctgacggaaatcaaccgcttcgtcaatcacttcctgtgtcagactcaggccgctgttgccgtccatcatgctcaccgccacgtcgttggatgcgcagatggcatacagcggggaggtggtggcatgcatcatgtaggcctggttgaagcgggagaagttaatcgccccacgaccttcacgtacatgaatataagaagcctgactcagcgcattcagcagtttgtgggtggagtgggtggcgaaaacggtaggaccgttgtgatcgccaggttcgccgcgcatggcatagtgatcggcatagatcgggttgaaacgtgcatagccgtaccaggcttcgtcaaagtgcagacgatcggaggttttttccagcagatcctgcgcttctttagcgttataacacacgccgtcataggtgcagttggtcaccacgcagtaagacggtttttgcccggctttgtctttggtcagcgggctttcactgattttcttctgcaaggtttcaggttgcatttcctgcggatagattggcccgataatgccgtagcggttgcggcttggcaccatatagaccggtttcgcgcctgtcagcatcaaaccttgttcgatggatttatggcagttacggtcaacgaccacgacatcgttatcggtcatgcaagcctgcatgatggtgcggttagagccggaagtaccgacgactacgctccaggagcgatcggcaccaaatacgcgtgcggcatatttttcgctttcgccaaatgcgccagtatggtcaagcaaagaaccgagggaagttcgttcgatgcccatgtcggtgcggaacagattttcaccatagtagtcatggtagaaacgtccggcgggtgttttggtaaaaccaacgccgccctggtggcctggcgctgcccaggaatattcatggatgtcactatatttcatcagcgcgctgaacagtggcggcaacagctgctggcggtagcgggtcatcgcggcaacggcgcgtccggcgataaagtcggcggtatcttccagaatccaggcgaattcatcgacaagctccagcaggtcgcgatccattgcggcgagggctttttcccgatcgcccaacaggaagaccggcacgttttgttggcgctcatgaagcttaccgatcaattgtctgacgttttgatgttcgtccggatgttccatttgatagctgaacatcaggcagtcaatggcttcgttactagagagaatggcaaaaccatcatcaaaggaggtggatttaatcacggtaacattttgctggcttaaagcatctgccagacgctcaacggcgttaccgacccaggtgtcttgatggagaaactcgctttcaacaattaatactttcatcattgcttacccggttatgaaggaatcttcgttgcgggcaagtatcttccggccttttcgggctgtaaagcgcgtgaaaaacaaacatttttgaaatatttagttttataaacaatacgttatgtgattattttaaattattttcactgcttattatcgacggctaaactatttttttggctgatactgatatcgtctttagccgggaaacgtctggcggcgctgttggctaagtttgcggtattgttgcgggctcatgccgacatatttgccgaacgtgctgtaaaaacgactactactacgaaagcctgccgtcagggcaatatcgagaatacttttatcggtatcgctcagtaacgcgcgaacgtggttgatgcgcatcgcggtaatgtactgtttcatcgtcaattgcatgacccgctggaatatccccattgcatagttggcgttaagtttgacgtgctcagccacatcgttgatggtcagcgcctgatcatagttttcggcaataaagcccagcatctggctaacataaaattgcgcatggcggctgacgctgtttttgtgtgtgcggctggttttattgaccagaatcggttcccagccagagaggctaaatcgcttgagcatcaggccaatttcatcaatggcgagctggcgaatttgctcgttcggactgtttaattcctgctgccagcggcgcacttcaaacgggctaagttgctgtgtggccagacttttgatcaccatgccgtgagtgacgtggttaatcaggtctttatccagcggccaggagagaaacagatgcatcggcagattaaaaatcgccatgctctgacaggttccggtatctgttagttggtgcggtgtacaggcccagaacagcgtgatatgaccctgattgatattcactttttcattgttgatcaggtattccacatcgccatcgaaaggcacattcacttcgacctgaccatgccagtggctggtgggcatgatatgcggtgcgcgaaactcaatctccatccgctggtattcgctatacaggctcagcgggctgcgggtctgtttttcgtcgctgctgcacataaacgtatctgtattcatggatggctctctttcctggaatatcagaattatggcaggagtgagggaggatgactgcgagtgggagcacggttttcaccctcttcccagaggggcgaggggactctccgagtatcatgaggccgaaaactctgcttttcaggtaatttattcccataaactcagatttactgctgcttcacgcaggatctgagtttatgggaatgctcaacctggaagccggaggttttctgcagattcgcctgccatgatgaagttattcaagcaagccaggagatctgcatgatgtctgcacccaaaattacatttatcggcgctggtagcacgattttcgttaaaaatattcttggtgatgtgttccatcgcgaggcgctgaaaacggcgcatattgccctgatggacattgaccccacccgcctggaagagagccatattgtggtgcgtaagctgatggatagtgcaggggccagcggcaaaatcacctgccacacccaacagaaagaagccttagaggatgccgattttgtcgtggtggcatttcagattggcggttatgaaccttgcacggtgactgatttcgaggtctgtaagcggcatggtctggaacaaaccattgccgatacgttggggccgggcggtattatgcgcgcgctacgtaccattccgcatctgtggcaaatttgcgaggacatgacggaagtctgccccgatgccaccatgctcaactatgttaacccaatggcgatgaatacctgggcgatgtatgcccgctatccgcatatcaaacaggtcgggctgtgccatagcgtgcagggaacggcggaagagttggcgcgtgacctcaatatcgacccagctacgctgcgttaccgttgcgcaggtatcaaccatatggcgttttacctggagctggagcgcaaaaccgccgacggcagttatgtgaatctctacccggaactgctggcggcttatgaagcagggcaggcaccgaagccgaatattcatggcaatactcgctgccagaatattgtgcgctacgaaatgttcaaaaagctgggctatttcgtcacggaaagcagtgaacattttgctgagtacacaccgtggtttattaagccaggtcgtgaggatttgattgagcgttataaagtaccgctggatgagtacccgaaacgctgcgtcgagcagctggcgaactggcataaagagctggaggagtataaaaaagcctcccggattgatattaaaccgagtcgggaatatgccagcacaatcatgaacgctatctggactggcgagccgagtgtgatttacggcaacgtccgtaacgatggtttgattgataacctgccacaaggatgttgcgtggaagtagcctgtctggttgatgctaatggcattcagccgaccaaagtcggtacgctacctagccatctggccgccctgatgcaaaccaacatcaacgtacagacgctgctgaccgaagctattcttacggaaaatcgcgaccgtgtttaccacgccgcgatgatggacccgcatactgccgccgtgctgggcattgacgaaatatatgctcttgttgacgacctgattgccgcccacggcgactggctgccaggctggttgcaccgttaaaacgcgactaaacgctactgcgccgggggatttattccggcgcacacctctgacgataccaataacagaaggcgggcgttggtaacagcgacccgataccctatgagcatttcaatgactacaaaactcagttatggatttggagcgttcgggaaggattttgcgatcggcattgtgtatatgtacctcatgtattactacaccgatgtcgtcgggctgtctgtgggtttggtcggtactttgtttctggtggcgaggatctgggatgctattaacgatccgattatgggatggattgtaaatgctacgcgaagccgatggggtaagttcaaaccctggatcctgatcggtacgttggcaaactctgtaatcttatttctcctctttagtgcgcatctgtttgaaggtactactcagattgtctttgtttgcgtgacctacatcctctggggcatgacttacaccattatggatattcccttctggagcctggttccaaccatcacgctcgataaacgtgagcgcgaacaactggttccttatccgcgtttttttgccagtctggcaggctttgttacggcaggtgtgacgctaccatttgttaattatgtcggcggtggcgatcggggatttggctttcagatgttcactctggtactgatcgccttttttattgttagtaccatcatcactctgcgcaatgtgcatgaagtctttagcagtgacaatcaaccgtctgctgaaggaagccatctgacacttaaagccatcgttgcgctaatttataaaaacgatcagcttagttgcctcttgggtatggctcttgcttataatgtagccagcaacattattaccggctttgctatctattatttcagttatgttatcggtgatgcggatttgttcccctattatctgagctatgcgggagctgctaacctggtgacgttagtattcttcccacgcttagttaaaagtttatcccgacgcattttatgggccggagcatctattcttccggtgttaagctgtggtgttctcctgttaatggcattaatgagctatcacaacgtcgtcctcattgtgattgcgggtattttgctgaatgtgggaacggcgcttttctgggtattacaggtcatcatggtggcagatatcgttgattacggtgaatataaactgcacgtacgctgtgaaagtatcgcttactccgtgcagactatggtggtgaagggcggtagtgcctttgcggcttttttcattgcggttgtgttagggatgattggctatgtaccgaatgttgaacagtctacgcaagccctattaggtatgcagtttattatgattgctctaccaactctgtttttcatggtaacgctgattctctacttccgtttctatcgcctcaatggtgacacgctgcgcaggatccagatccatctgctggataaatatcgcaaagtaccgcccgagcctgttcatgctgatattccggtcggtgcagtgagtgatgtgaaagcctgacgtggacaatagctaacgaaaatggcctgatgcgatatgtttatcaggccacgtcttaatgtaatgctttggatttgcaaattttgtagaccggataaggaattcacgccgcatccggcatcaacaaagcgcaagttgttatccggttatcaagccaaagcgccgtagctggcggcaatgaaagcgagcgaggaatatcaccgtcgttaatgcgccaagcagcgcgcagaacatatcggattgcgtgtcccactggtcgccctgggtgccgagaaaatcatccgctccctgacccattgccagcgctgcccaccactcgattaattcatacatcgcgcttatcgccagcgccacgcagcagaccaggaacgccaccattttacgtccgcgcacgtacatcccgcgaacgagaatttctcgtgccaccagtgcaggcaccagcccctggaaaaagtgccccagcttgtcatacggattacgactcaaccccagccattcctgcacctcaaaaccaacggggactttcgcgtaggtgtattgtccgccgaccatcaggatgatggcgtgaaggaaaatgagcgtatagagcagcggcgttaacggataacgtctggcggtggcaagcagtagctgcacgacaataatcaccggtgtcacttccatcagccaggtgagtttgtcatgggcgctaatgccggtataaatcaggattaacgttagcgtcagtgcgctggtgttaagaattaacggcttgagtgtgcgggtcatggtgagttcgcaaatcagggaaaatactgactattcaccagcaagcgtgaaattacaatcgcaaaagaggtggccagggggatcacctggcagcatgctgccaggcgctgggccgaagaggttacttagtgcagttcgcgcactgtttgttgacgatttgctggaagaagtcgttacctttgtcatcgaccaggataaacgccgggaaatcttctacttcgattttccagatagcttccatacccagctccggataagcgacgcactccagatgcttgatgctctgctgcgccagtaccgccgccggaccgccgatgctaccgaggtagaagccgccgtgtttatgacacgcgtcggtaacctgctgactgcggttacctttcgccagcatgatcatgctgccgccgtgggattgcagcagatccacgtaggagtccatacggcctgcggtggttgggccaagactaccacttggataaccggcaggggttttcgccggacccgcgtagtagatcgggtgatctttgatgtactgcggaagttctttaccggcgtcaatcagctctttcagcttggcgtgtgcaatatctcggcccacgataatggtgccggtgaggctcaaacgagtggataccgggtattggctaagctgggcgaggatctctttcatcgggcggttaaggtcaactttcaccgcttcgccttcaccggcctggcgcagttcttgtggaatgtactggcctgggttgtgttccagtttttcgatccagataccttcgcggttgattttcgctttaatgttacggtcagcggagcaggagacgcccatgccgaccgggcaggatgcgccgtgacgtggcagacggataacgcgaatgtcgtgcgcgaagtatttaccgccaaactgcgcgccaagaccgagtttctgggcctcttccagcagttcctgttccagctggacatcgcggaacgcctgaccatgttcgttcccttccgtcggcagttcatcgtaatagtgagcgcttgctaacttgacggttttcaggttggtttccgcagacgtaccgccaatcacaaacgcgatatggtacggcgggcaggctgcagtaccgagggtacgcattttctcgacgaggaagtttttcagtttgccgggagtcagcagggctttggtttcctggtagagatacgttttgttggcagagccgccgcctttcgcaacgcaaaggaatttgtactcatcgccatctaccgcgtacaggtcgatttgcgcaggcaggttagtgccggtgttgacctctttgtacatgtccagcgccgcattctgactatagcgcaggttatcttcgatataggtgttatagacgcctttgctcagcgtttcttcatcaccgccgccggtccacacgcgctggccttttttaccgacgatgatcgcggtgccggtatcctggcaggtcggcagcacgcctttggcggcgatttcggagtttcttaagaattgcagcgccacgtacttgtcgttttcgctggcttctggatcgtgaagaatagccgcaacctgtttctggtgtgccgggcggagcataaaagaagcgtcgtgaaaggcttgctgcgccagcagggtcagggcttctggttccactttcaggatggtttcgccgtcgaagtcggcaacgctaacgtaatcggaagtgagtagatagtattcggtattgtctttccccatcgggaaaggtgcctggtagataaagggtttgttactcatagcttccagcctgtaactctgtatttgttattcgaaaatggcgtgccgcgtagtcacgggcggcacgcaaagtgcatttataagaacccgtacatcgcggcgaagatccagccgaagacgcagcttacgctcacaccaatcaaccccggcagaataaagctgtggttgatgacgaagcgaccgatgtgggtggtgccggaacggtcaaactgaatcgctgccagatcgctcggataagtcggcaggatgtaataaccgtagcaagccggtgcactagccacgatgtatgccggatcaacgccgatcgccagcgcgaccggaacaatcgccgccagcgccgcagcctgagagtttacaaacttggaaaccagcagcagaacaatggcataggcccacggatactctttcaccatttcacccagtacgccctgaatttcagacatatgcgcaccgaacatggtttctgccatccatgcgataccgtacaccgccacgatggcgatcataccggaacggaagacttcgtttttactgatagacgcgggattggttttggtcaggataataatcagcgccccggtcagcagcataaacatctgaataaccagtaccatgctcagcggtttgccgccgaaggatggacgcaggtcgctatcagcaccaagaagggcgactacagcgattgccccgaggaaaatccacattgccagccagttgcttttcggcagttttttatccagcagcgtcgcggtatcaccgtaaacatactcacggttttccggtacggagatgaatttctggaactcttcgtctttatccagatctttaccgcggaaccagctgaagataccgatcgccaggataccgattaacgtgcttggaatggtgattgccagcagatcgaggaactcaagatggcgaccatcaaaggtgacattacccagcatcgcaaccagagacacgaccgcaacgctcaccggactggcgataatccccatctgtgcaccgatagaacttgccgccatcggacgttccggacggatgttgttcttaatggcgacgtcgtagatgatcggcagaatggtgtaaaccacatgacccgtaccgcaaagaatggtcagtgtacaggtcacaaacggcgcgacaatactgacatatttcgggttgcggcgcagcagcttctcggcaatttgcagcatgacatcaagaccgccgctagcttgcaaggtcgcgcttgccgccaccaccgcaatgataaccagcatgacatcaactggtggtttacctggctgaaggtggaagacgaagaccagaatgaccagaccgataccgcctaataaacccagcgcgataccaccctttctggcaccataaaacagacatatcagtattatgataagttggatagtaaataacatgtgtgaaccctcgcgataatcctatttaaatttttgctgaatagatcacagtcacgttctgttttgtatgaactgttttcagagcctgactaaatatccgtttggtcgttaccggctttagcaaatacctcacagtgaatattggctgattaaagcagcggcaaatttatgcactgtgataagcggctttttcagagagaaagactctctggcgatgggtttatagtttgtactgcgcagatgttaatgttttgtttgctgttatcttattgatatttatcggtctattttttgttctcagggcagatgtcattaggtttatagattaatctgatctacccatttgtgggtaaaaatacacataatgcgggtgacataatagttaattaacttttgttagcgttttgaaattaaaaacaccgttcacctgaagagatattaatttttagcgatgatggagggataattatatttgatctggcacaagttttactgatgaaggatgtaacttgtgccaggggtattttgcattacggtaataattattacttacagataaccagcgatccgttattggcaatattgtttcagtagactgtagtgttctgcctgaatacggtaacggtaaactggacgccccgtgacgccataatggatactggtgaacaagatgtggcagttgaccagccagatgaggtatttacggcaggaaacacggctaatgttaacctcgttggctagctcgtcggtactaaattcatagtcctgatgcgcgtcaatccactggcacagtgtgcgtaacgtctgcggcgttaagccttttggcaagcgacgaggatcctgttcgttggagctgctgccgtggattagctgatcaagctcggcctggtcataatactgatgtttttccagcgccattttcttttgccgccagccggtgagcgcctcttcaaagcgggaagcctggaagggtttgatcaggtaatccacgacaccgtaatgcaggctatctttaatggttgccgcatcggctgcggaggagatgacaatcacatcacttttgcaacgcgcgttatgcaggacaggcagtaaatcgagcccgttctctttttgcatatagatatcgagcaatatcaggtcgataggcgtatcgctattgaagataatctctttggctttctccagcgtgctggctgttccacagcattgaaagcctgggatttgtgctacgtatcggcgattcagctccgcgaccattgcgtcgtcatcgataattaatacattgatcatctgttgctcctctccccgtcccagggtatctggacaaaaaattgtgtgaaaatcccgggttcgctttccacggcgatgctgccgccgagattttctacctgttgtttgacaagtgctaaaccgacgcctcgctcgcttccttttgtgctgacacctttgtcaaaaatgtgatcgattttatcgggtgcgatccccggtccatcatcattaacttcacagtgcagccagccgtgacggtagtgcaatgttacgctaatttcgcctccgggttccggccctaatgcctccagcgcgttttctatcagatttcccaacgtggtaatcagcgtcgcgacctggtcctcactgccgctgtctggcagctggctttcactgtttaaaatcagcgtatggcctaaatcggtcgcgcggttaatcttgctgattaaaaaaccagcgataaccggagatttgatcttacccagcagagagccaatctcttcctgatagttattggctgttttgagaatgtaatcttccaactgcttataactcttcagatgcaataatccgagaatcacatgcaatttattcataaattcgtgggatcgttcacgaagtgcgtcagcatagttgaccagaccgtcgagtcgctgcatcagtttacgtacttcagttttgtccctgaaggtactaatggcaccgatgataacgccattactgcgcaccggaacggtgttgatcagtaatagccggtctttaatcgtaatctcttcgtcgcggcgcggggtaccgtcgcgtaacacttcgctgacatctaccacctgactccaactgtggcttagcgtgctcagtttctcatcgtcctggctcttacggtaattcagcaattcttgtgcggcatcgttgatcagcgtgacctcgccgcgatcgtccacggcaacgacgccttctttgatagactgcaacatggcctggcgttgctcaaacagcgtggagatttcgtagggttccaggccgaaaaggatttttttcagtaccttaaccagaatgcaggtgccaatcagtccgaccagcatgccaaataatacgctccagataatgctccagcgactgtcattgatctgttgggtcacacggcttaactcaaggccgatcgccaccacgccaatttgtttatgattttcatcgtagatgggggtaaatacgcgtaaagcctgcgccagaaaaccgcgattgatagcgacattttcttcgccattcagcgctttaaggatgtcatcacctttaaatggctgaccaatacgctgggcttcaggatggctgtagcgaagactttgcatatcggtaacgacaataaacagcagatcgttgcgtttgcgtacggcttccgcgatggcctggatgccactctcctgcggttttttctgcaagccctgacggatttccgggctgtcggcgagggtacgcgccactgccagtgccttgttggctagcccatctcgcgtcatatcactgatttggctgaagtaaatcagatgcaccaccaatagcacgctgaacagtaccgcactgaccattaagatcactgtggtactcaatttcatcggacgtttgcgtaacatgcggtagggcaaactatgtctcatcagcttccttgtgtgacaaatttcttaagcattatctctgatgaggcgggtaattcaaagggagtaagaatgattggctatataggggaagagactctggcaacggaaactgccagtgctgtatgaagattccggggctatgcttatagcgataatcatactgatgagagagggaaggtcatggatcaggcgctactggacgggggttatcgctgttataccggcgaaaagatcgatgtctatttcaacactgcgatatgtcagcattctggcaattgcgtacgtggcaacggcaagttatttaatctcaaacgaaagccgtggatcatgccggatgaagtcgacgtcgccactgtggttaaagtgattgatacgtgcccgagcggcgcgctgaaataccgtcataaataagcgagggtaaaatggaaatacgcgaaggccacaataaattttacattaatgacaaacaaggcaagcaaatcgctgaaattgtctttgtgccgaccggagagaatttagcgattatcgaacataccgatgtcgatgaaagcctgaaagggcaagggattggtaaacagctggttgcgaaagtcgtggaaaaaatgcgtcgggaaaaacgaaaaattatcccattatgcccatttgcgaaacatgaatttgataaaacgcgggagtatgatgatattcgcagttgatgggagagtacagagtcacgatatttttcattctctccgcgatgtgatgcaggagagcatctgaagggtagggggatgcacaaagaatgggcagagagcgcgtttttttgtcccaagtcatcccctttactgagcaaaaaaaagaatatctcctatatgagaatcatcaatcggggttaataagttttgcgtccccagagcgtttaatattgataggagtcatattatggaaggtaaaaacaagttcaatacttatgttgtttcttttgattatccaagttcttattccagtgtgttcttaagattaagaagtttgatgtatgatatgaatttctcctctatcgtggctgatgaatatgggataccacgacaattgaatgaaaactccttcgcaataacgacaagcttagccgcaagtgaaatcgaagatttaatcaggctcaaatgcttagacttaccggatattgattttgacctcaacattatgacagttgatgactatttccgtcagttttacaagtaaccaggaaggataagaagaacataaaaaatggcactattctctaaaatattaattttttatgtgattggtgtgaacatatcctttgtcattatctggtttatcagtcatgagaaaacacatattcgtttacttagtgcattcctggtcggaataacctggccaatgagtctgcctgtggcattacttttttctctcttttaagagctgtagttgagtggacccgctggttatcgtgaaacgaagcgtctctcctcaaaactggatttgcggaacgatgaacgaagcagtcgcctgactgcttcgttcattaaagtgaaatttatttctgtgggcgcatcgccgggaagagaataacgtcgcgaatagtatggctgttagtaaacagcataatcattcggtcgataccaatacccagaccagcggttggcggcagaccatattccagcgcagtcacgtaatcttcgtcatagaacatggcttcgtcgtcacctgcagctttagcattaacctgttcctggaaacgttcagcctgatcttctgcgtcgtttaattcgctaaaaccattaccgatttcacgaccaccgatgaagaattcaaaacggtcggtgatttccgggttaacatcattacggcgtgccagcggggacacttctgccggatattccgtaataaaggttggctgaatcagatgtgcttctgccacttcatcaaagatctctgtgacaatacgtcccaacccccagcttttctctaccgtaataccgatagattcagctaatgctttagcagcatcaaaattatccaggtcggccatatcggtttctggacgatattttttgattgcttcgcgcatggtgagtttttcaaacggtttgccgaaatcaaacacatgctcgccataagtgactttagtggtacccagaacctcttgtgccagggtgcggaacagactctctgtcagttcaatcaaatcgtggtaatccgcatacgccatgtagagttccatcattgtgaactcaggattatggcgaacagaaataccttcattacggaagttacggttgatttcgaatacccgttcaaaaccgcctacaaccagacgtttcagatacagctccggcgcgatacgcagatacatatctaaatccagagcattatgatgggtaataaacgggcgagcagatgccccacctggaattacctgcatcatcggggtttctacttccataaagccgcgcgcgaccatgaattgacggatagcggccagaattttactacggacaacaaacgtttgacgggatttatcgttagcgatgaggtccagataacgttgacgataacggacttcctgatcctgcagaccatggaatttatctggtaaaggacgtagtgctttagtcagcaggcgcagctcagtacagtgaatggaaagctcacccgtttgcgtcttaaacagcgtaccgcgggcaccgataatgtcacccagatcccattttttaaactgatcgttataaacaccttctggcaggctatctcttgcaacgtacagttgaatacggccaccgacatcctgcaacgttacaaaggaggctttccccatgatacgacgggtcatcattcggccagcaacgctgacttcaatgtttaaggattccagttcctggttatccttcgcatcaaactcttcgtgcaactggtcagaggtatggtcgcggcgaaaatcattgggaaacgccacaccttgctgacgtagtgccgccagtttttcgcggcgatttctcagttcatcgttaaaatcaatagcctcattggctccccgtgtttcttgttcagacattttggttcctctaaatccagctttcaatttagcgtagataaagagacagatcggtacactgtattatctgcctcgactattagtaactcagtttatcttatcgaaactaacgcttacctcaagttgatatcactaataaataaccatcaaaatggtttaaatgacttattaatctcgatttgttagtgttataaactaaaagttaatttattcataaccaattgtttttacgacagttaatcgttgctctcctgtatcatattcgtcggcgtgctaaacagaaaacgggtagcaaaggccaatacgacgatgatcgcgacacaagccaacgtccactctcccatctgagaaaagaatcgctggtaagctgcaattgccataccgctaatttggctctctgtcgtctgctgtgccacgacgcctgccagccagttggcgaccgcgcctgttgccagcatataaatcccggttaatacgccagacattttcagacgcgtgatttgcgcaatcgccaccgggtcaataaagagttcggcaaagcccattagcgccagcccggatatcatcacgcccatactcgcttgaccgtcagccgctgcatgtcgggcatcaaatgccaacaacataaagccacaagccatcagcagtaagccaaaggcaaacttcagccagacgcgcaatgtactgttgccgcggctttctgggctcgccagccaggccagtacaaccccagcgagcatcaccgcaattgcattcacgctctggaatagtgctgtaggtacttcaatattgaatgcctgacgattcacaaagcgatcgataaacaagctgatggtactgccgccctgttgtgccagtacccagaacaatgtcccgacaaacatcaacaatacaatttgccaaagagcacggcgatgttcggggaatttgatcatcatgcgggcaatgatttgtgcggcaatgaggcaaacgatcgccagcaaatatccggaccagtcgttctccagcagcagagtaaaaaatactggggctaaacagagcatcaccactaaccagctccatactggtaaggcaaatttgacactagtgagcgcttttttatccatactacgtgtggactggaaatgacgatgaccgcttaagaaaatcaacaaaccgataaacatgccgccacccgcaagggcaaagccaacatgccatccataccactgagcagccaggccgcaggcgattggggctgcgatagaaccgatattgcccgcagcatacagcaggctaaaaccgccatcacgtcgatgatcgttctcgtcgtagagctcgccaagcaaacagctgatgttacttttgaataaaccgtagccacaaataatgattgccagcgccagatacaggctaaaggtactatttgtatcaatacccagcaccacatggccaagggtcattaacagcgcgccggcaatcactgcagtgcggttgccgagcaggcggtcggcaagccagccgccgagaataggggtaacgtaaaccagagaagcatatgcgctgaacaggctgatggcatggttatcatcaaaaccaagctgatgggtgagatagagaatgagtaaggcacgcatgccgtaaaaactgaagtactcccagatttggatcgccacgatatagtatatcgcgcgcggctgactgggtgttttcatgtgttctccttatgagcaaaaaagggaagtggcaagccacttcccttgtacgagctaattattttttgctttcttctttcaataccttaacggtatagcggccatcagcctgacggtatgcaccgtgaatatcggtttcaaagcccggatagtgagcgccgatttcacacagcatctgcaggaactccagaaccggacggctttcttcggtgatcatttcacccggcattaccagaggaactcccggcgggtacggaaggatcatattggcgttaatacgacctaccatttcgtcgaggtaaacttcttcggtcataccgtgcagctctttctggaatgcagcatacggagtcattaccatcgtcggcagcacttcaaatgcgcgatacatcagatccggcagattgtggtgaacaatcagtttgtggatattctgagccagttcctgaatacgcatgttttcatagaattcaggatcttcacgatacagagacggcagcatgtttttcacacgcaggttcaggtcgaacgcacgtttaaagtcagtcagagcacgcagcaggctcagtgctttggtcttatcgataccgatgctgaacaggaacagcaggttatacggaccggttttctcaacaacgatgccatgttcgtcgaggtatttcgccacgatgctggccggaataccaaagtcgctcatggtgccgtctttttccatccccggagtcagcagggtgactttgatcgggtcaagatacatgtgctcgttatcgatgtttttgaagccgtgccaggtgctgtcagaacgcagcggccagcattcagtcgtatcgatatgatccggctgccatacatcaaagaaccagccatcagattccgttctcagacgtttgatctctttacggaatttgatcgcacgttcaatagaaccgttgatcagacgcttacctgcattgcctttcatcatcgccgcagcggtttcagtggacgccacgataccgtagtgcggagaagtggtggtgtgcatcatgtaggcttcgttaaaggtttcttcgtttacgtcacctttaacgtggatcatggaagcctgagagaacgccgccagcagtttgtgagtggactgggtttcgtaaatcactttcccttctacacggccaccgctcataccgcatttaccttcgtaaatcggactgaagttggtgtaaggcacccacgcggagtcaaagtggatggatttcacatccagtgttttcttgatgaagtcggtgttgtacagcagaccatcataggtagagttggtaattacagcatgtaccggccaggttgcgtttggtgtttctttcacgcgcttagcaatggtagcgtgctggaattcactctgtgggataccaccaagaataccgtaagcgttacgggtcgggcggaaatagattggcgtaacatcgctcatcatcatcaggtgggtcaggcttttgtggcagttacggtcaatcagaatggtgctgcctgctggagcagagtacataccaacaattttgttcgcagtggaagtaccgttggtcaccatgtagctgcggtctgcgttaaagacgcgagcgatatactgttctgcttctttgtgtggaccactgtgatccagcagagaacccagttcagatacactaatggaaatatcagatttcatggtattcggaccaaagaaatcatagaacaggctacctaccgggcttttctggaatgcagtaccgcccatgtgaccaggagtacagaaagtatatttaccttcacgaacatatttaaacagtgctttagtcagcggaggcagaatagtgttgatatattcgtcagtggtctgcttgatcttattagcaatatcttcagcagcacccagcgcatattcaaagaagctaatctgtaaacgcaggtcattcaggcttacatcgagagtggaatacgtattagcgaacgcgtacaacggcaggttctcgttcattttgctaatttcttcgcacagctcgagattatatttatcccagtcaaaaataacgccgcacagacgcgcattgttttcgatcagttttaataagtcgtcacggtcgttcgggtaaacaatctggaagttcagacgttcaagcgcgcgatgaagttcacggatgggttcttctttaaaataaacccccatgtgattcaatattgcaataacgttcatagtcatatctccaggtaaaaaaggcccctcccaacacatgggacaaaatgaaaggaggagcctcggaaaatacttttaattaatgtgcgttagacgcggtgtggttatccatactgtggctctggcgctcgtgcattttgcgagcgtagaacatcaggataatcaggctgacgatgaaggtacctgccagctcgaaggagcttgcgcccatcagcgcgatgaagcagaacacgcaacccagtacagagcagatcaggctgacaaagttgcggatgttaacgccttcaaaacgaatcaggtcaacgcaagagtagaaatacggcagcatagtcagcagtactgcgataccggtcagttcaccgaacaggtcagatgctttaccaccggcagagttcatcagagtgataaggatcatcagggcagtcattttcactgcagccagcagcagaccttttttcggaataccgttgctgtcgacttcaccataaactttcgggaagttaccgtcgttagcggcacgtacacctgcctggcctaccaacatcatccaggagcccagagaagtcaggcacgcaaaggcggtgaatgcagaaaccagcggcgcagcccagttaccgaggatagtactagcactgattgcaaacggagcaccggaagccgccattacagaagacggatacataccggaaagcacctgagtcgcagcgatgtaaacaatacctgctaaaccagtacccagcatggttgccagcggaacggtacgtttcgggtttttaaccataccagtacttacagctgcggattcaacacccacgaaggcccacaggcagagcagaatacttttaatgatcgcatgaccatcagtggtatccgcagtattccagttagctgcataagttgccgcatcaaaccaatgccagccaacaatagcagtcatcaccacaggaataagaaccagcaccagaccaatagtggttaaacggcttacccaagtaccgccgagcatatttacaaaggtaaatacccagacgatagcaatacaggcgatacccgccggaacaggatcatttaatactgggaagaaggtggaaagataagatacagcggtaataccaatcgccaggttaccaatccagttagcatggtaataaagaacacctgtctgaaaaccaaatgcaggggaaatttctccggcataagcaattgggccaccttgttgcgggttttttgttgccagtcgggcatatacatacgccaggctcattgcaccaataatagagataatccaaccccagatagcaataccaccgatacttgctaggttcgcaggtaataatgcaataccgctccccatcatattaccggcaacaacaccggtacaggcaaatagcccgatcttcttggcagaactcatgctcttctcctaatttcatttttgaatttggagtccgggtcatgatgtataactatttcctgaccagaccaaactggcgataagattactcacgaaaaaaggattaatcctaaagattaggtgaaataacacaaaagtttctgtaagtgagaacttgaggttttttattaacacatcaggatcgcaagttgatatcatgaaaagataaacatttaatgtttacaatggattgcgtgacattctctggttaaatttatgtaataaaaattatgcggcaaataaattgccgcaacatattataccaacaggaacatacaaaaactcaacaacaaatatttccgagcataaatcaacccggagttacttattcactagcaagaaatttgtcgagataaggtacaacataaggaacagaagtctggaatataccattttcaatccagtaaagggtgtttgcccctgggcgtaaattaaaggcggtgagatatgcatcagctgcttcccggttcatccccttcatttcataaaccttgccaagcaacacataatttagccaggacatttcaagatcaatgccagtatttatcgcctggtaagactcatctgttttaccttttaccagagcactgaccgcttttatttgatatataatggacaggttgttcaattccggcagtgtaacaatgttatctatttctgtgttcagtgctgctaattgtttttcatctaaaggatgttgagaatggcgcacgatatcaactaatgctttttctgctctcgcgtaggtaaattctggggaactttgaacaatctcacctaataattcactggcacggttcaaacttttatcatcgccatgcagtaaataatcatgtgcctgataaaaattagttaataacgcaccacgatgcggcaaaattttctggagcgtctcctgcattcgttgtggccacggttggtttaacgctttacttaaactctccagtaaatcattttgaatcgccagctgattaccgttagtgatgacataacgtttatccagcatggtactaccatctgcattgtctaccaattttatgctcataaagcattgttgagcacggtattggcgctgattaacaaacgcaatagataatgttttaccggaactgctcggttcatcaatgttgtagttgattttgtcatgcaccataaaggtggagaaggtgttaagacttgtcgccaccaaatcacccacgcctatcgcgtaagagagctgatacggggaactccagctgttacaacttttatttaccatattaatgtcaatatcgcgtggattgagcaaaatacggcttttgctcataggaagacgtgtatcaagactactaaacgctaccagtgctacacagatacctaagctcaacaggaaaaaaaaccatacccaaaaggtagtgaatcgtttgcttttaactggggattgttcaggtggcgttgcggtgttttgaatgttaagactgtgggagggagaatctgtggcaggaaccgcctctggtatagggggagggctagatagcattatttcctctccctcttcttcgctgtaccagataaccggcaccattaatttatagccgcgctttggtacagtagcgatatagacaggactatcttcatcattatcttttaaactcttacgtagttcactgatactctgcgtcacaacgtgattggtgacaatacttctcttccagacattatcgataagttcatccctgctaagtacttcgccactgtgttgagcaaagaaaaccagaagatcgattaatctcggctcaagggtaagttgacgcccattgcggctaatttggtttatggacggagtaacaagccattcgccaacgcgaactacaggttgttgcataatagaaactcattcgaaaagggaatgatgcaatgataattgccacaacctatttttaccatctatagatgggtttatttacatattattggtgaatgcaagacgttatttttaccagccataaacttcttgattacatagtattacgaaaggattttactgagaaccagaagtaatattccttaccatcaaaattcatcatctttgccaaagaaaaatgttcagaaaataatccatggaaaattgtccggagcacttactattttaatggattgttagtctttgcatgagcaagcgaactgatacatttctctttgttctcattcagaaaatctcatcagtcgccgttcagaccggtgttgtgctttatggatgcgttacgctcctgatgacgtcatttgacgttcaacagcatcacggggccgcacgacatttcacgtcagttagtgctatagctcaggaacaaattttcccgaattgggatatgcccgcaaattgctggtgatgtggggagaatctggttgagttcggtagaattgatttggaggcagaacgcttaaatcgtggcgtcctgaaacgaaaaacggacctccgtggaggtccgtttatatgaatttggtgcccggactcggaatcgaaccaaggacacggggattttcaatcccctgctctaccgactgagctatccgggcaacggggcgcattaaaccgtaatctgcacatctcgtcaacctaatttcagtaaaagcgattcaactgcttaagattgcggcaaatcgcttcttttctgtgtttctgtcaggtcaatgcaccaccctggcggcagcgggcgaagcgcaggatatcttccgccagccgatgtgcagtgtcgacatccgcctggctacgattcaccagcattcggcttaaacagccttccagcaccagttccatctgctttgctaccatcgccggatcgtcaacttccagtgtggttaacagttcgtgggtgaaatcgtaggccgcgcttttttgctgatcggccagttgatgaatagggtggccaggatcgggataaaacgtacaggcagcgataaatagacagcccggatagcggttgtttttaacgcactcgcttaacgcctgataacgtgccagcagcttttgttcggcggtttgcgtttcgtccagcatcagctgacgacgccagacatctatctgttggctaagataacgcagcgcatcgtagaggattgcctctttgtctggccagaagcggcgtagctcgtccagtggataatccacacgttcagcaaccatctccagcgtggtgttggcaatcccttgtaattctaataatttcagggcttctcccagtacatcttcacgttgcacgctattttcctccgtctttcccactgcaagtgtcgttcacggttggcgatcgcgcaaatgtgcgctgaaggtttcagcatccataaagcccgtgacgcgtgcttgtggatgctcctggccttgtccgtcaaaaaagagaattgtcggtaggccaaggacattaagatgctttaacagcgccacatcttgtgcgtcgttggccgtgacgttggcctgaagtaagaccgtgtctgctaacgctttttgcacctgcgggtcgctgaaggtgtatttctcaaactctttacaggcgacgcaccagtcggcataaagatctaacatcaccggtttgcctttggcttcaacgagcgcctgatttaactcatctaccgttttgatttgtgtaaagttgagatgcgtctgagtttgcgcggtatgcgtcgcaccaaatgcccaatcctgaagtgggcgcacgctaaccaatgccgctgccagcagaataatttgcacaatacgcatccagccgcgtttagcctgtaggctggtgataaaggcccagccaaagaatgcgacacccagcgcgctccacaagcgtaatccccatacatcaccaatcactcgctccagcaggaagaccggcagtgcgaggatcacaaaaccaaacgcggttttgacttgttccatccacgggccgcttttcggcagcaagcggttaccaaagacggtaattagcatcagcggcaggcccatgcccaacgcatagagataaagcgtgccgccgcccagccacatgttcccgctttgggcgatatacagcagaatcgcgctaagcggtgcggtggtgcatggactacagatcagtccggcaatcgcccccataacaaacacaccgccaggactgccgccctgttggcgattgctcatcaacgtgagacgtgtttgcaggctagaggggagttgcagggtaaacaagccaaacatactcatcgccagcaaggtaaagacgatggcgaggccaatgagcacgtatgggtgctgtagcgccgcctggaactgtaaccctgcggcggcaaccaccagacccagcgccgtgtaggtcagcgccatcccctgcacataaataaaggtcagcaacaatgctctggcagtggagagccgctgtttaccacccagcacgatgccagaaatcagtgggtacattggcagcacgcatggcgtaaaggcgataccaataccgatcaacaacgcccagagcgcggaaaagggcaattgcgcggtgggctgctcttgctgcggaacagacacaggctgtggcgctgcgttgttggcgaccacttcgcttaacggaacggttttggtttctggcggataacagaaaccggcatcagcacagccctggtaggtgacagttaacgtcgctcccgcactcgcctggttgatggtgacgggaagcgtcagccgatcgcggtaaatctcgcttttgccgtaaaactcatcttcatgccagacgccttgcggcagctgcacgtcggcaattttcgcgtgttccggcgtaatgcggatctgtttacggtagaggtagtaaccgtctttgatctgccaggtcagattaaggtcatgttggttttgctgaaaatcaaaagcaaaggcttgatccgcggggacaaattgactacgtcccggcgcgtcgaataatccggcaaaaacggaagtgctgcaaagtagcaggatcagcgtaaagatgcgttgagccatgagaggtaatctgtgtctccttatgtcagcgtaaagatgcgttgagccaactgaggtaatctgtgtctccgtgtgtaacaggtaaaaccagaagttccggggtttgatatggatgatgagacttcaggcattccagcagtgcctgctggtgagatacggtagtttttaaaatcatctgcacttcgtattcttgctccagcttaccttcccagtaatagagagaggtagcgccggggatcaaggtcgcgcaggccgccagtttttccgccagcactttggcggctaaatcctgggctgtcgcttcatctggtgccgtacatagcaccacgacagacgcggtattgctacttttttcatcaagcataaacacctcgcaagaacagatggaaccgcaagagagaggtcactatacaacggacgggggaaggatgttagtcggcgggaaagaaagcggggcgtgaacgccccgcgattgatcattacagcatgaagctacccagcacgaagccgaagcaaacggccagggcaacacccagagtacccgggatgaagaacggatggttgaagacgaatttaccgatacgggtagtacccgtgtcatccatctgtaccgcagcaaccagcgtcgggtaggtcggcagaatgaacagaccagacaccgcagcgaaagaagcaacagcggtcagcggactaacgttcagtgccagagccatcggcatcagtgcttttgcggttgcagcctgagagtacagcagagcagaagcaaagaagaagatgacggccagcagccacggatgaccctgaatcacttcaccagcggtatctttgatccagtcgatgttgttggaaacgaaagtatcgcccagccacgcaacacccaggatacaaatacaggcgctcatacctgctttgaaggtgctggagttgaggatgttgtcggtatcgactttacagataacggtggtcagagttgcaacgctgagcatgatgatcaggattgcgttggtggtgttcatcagcggtttttcaaccagacccatgcttgggctgttgatgattgcatagataaccacgccaactacgcccagcaggaacagccagacggacgtttttgcaccggatttgatttcaatctgcttttcaccgcgcagttcaaccaggccctcttccagacgcttgcgataaatcggatcgtcagagagtttggagttgaacagcatagtgaccaggaaggacatcaccagaaccgccagcagggtggacgggatgaccacggagagcagatggaggtagctgatgccatgaccttccatcacggaagacatgtaaaccactgccgcactgattgggcttgcggtgatcgcaatctgcgcggataccactgcagtagacagcggacggcaaggtttaacgccttgttccttcgcaacttcagcgataactggcagtgtcgccagagagatgttgccagtaccagcaaagatagtcaggaaataggtcacgatcggtgcgaggatcgtgatgtatttcgggttacggcgcagcagcttttctgtctgatgaaccagatagtccagaccgccagcaacctgcatggcagaaatagcggcgataaccgccatgataatggagatgacatcgaacgggatgttaccgggtttaacgccaatagcggcaagaaccagcacccccaatccgcctgcaaaaccaatacctattccccccaatctggcgcccaagaagatcgccagcaaaactatgatgagttctacaactagcatattagccttccttgttttttaacaagttgatattagattgttatttttaagttactgctcacaagaaaaaaggcacgtcatctgacgtgccttttttatttgtactaccctgtacgattactgttcgctttcatcagtatagcgttttgctttgtaagccgggtgcatcagattctgtacggagaaaatatcgtcaagttccgcttcagtcaacagaccgcgttccagaacgacttcacgtacactcttaccggtttcggcacagattttacccacgatgtcaccgttgtggtgaccgatgaacgggttcaggtaagtaacgataccgatagagttgtaaacgtaaccttcgcacacttctttgttagcagtgatgccgttaatgcatttttccagcaggttgtagcaagcgttggtcagaatgtgaacggattcgaacatggcctggccaatgaccggctccataacgttcaactgcagctgacctgcttctgctgccatggtaacagtggtgtcgttaccgatgactttgaagcatacctggttaaccacttccggaacaaccgggtttactttagctggcatgatggaagagcccgcctgcagttccggcaggttgatctcgttcaggccggcacgtgggccactagagagcaagcgcaggtcgttacagattttggacatcttcacagccaggcgtttcagcgcgccgtgaaccataacataagcgccgcagtcagaggtcgcttcgatcaggtcttcagccggtacgcatgggaagccagtaacttcagccagttttttcactgccagcggagagtactctttcggcgtgttcagaccagtaccgattgctgttgcaccaaggttaacttccagcagcagttcagcggtacgttggatgtttttcacttcttctttcagcaggatgctgaaagcgcggaattcctgaccgagggtcatcggtactgcgtcctgcagctgggtacgacccattttcaggatgtcctggaattcgacagctttacgttcaaagccttcacgcagttggttaatcgcatctaccagcttaatcagggaagagtaaactgcgatacggaaaccggtcgggtaggcgtcgttagtggactgacatttgttaacatggtcgttcgggttcaggtactgatattcacctttttggtgacccatcagttccagaccgatattggccagcacttcgttggtgttcatgtttacggaagtacctgcgccgccctggtagacgtctaccgggaactgatccatgcattttccgttgttcaggacttcatcacatgcggcaatgatggcattcgctacacttttaggaatggtttgcagctctttgtttgccatagctgcggcttttttaaccattaccataccgcgaacaaattcaggaatatcactgattttgttgttgctgatatagaagttttcaatcgctctcagagtgtgaacaccatagtaggcatcagctggaacttccctggtacccaacagatcttcttcgatacgaatgttgttactcatgtgaaccttctttttcaagctgccaatgatttgctttaaacacacagaatatatgtggtttcgaatgtttttcgaccgacgattatcccctgcatcgaccgaatacccgagatcatatgctgcttgaggatttctaccgtaatctggatcactttaagtgtcggtttttaccccttaattattaatttgtgaaatagatcaccgctttgggattactaccaaaaatagttgcgcaaacatcttgaaattttgctaatgaccacaatataagctaaacgcgattcgcaacccattcaggtagccggggttaaccggctgctattacaggagaaacctttgcgctggttaccttttattgccattttcctttatgtctatattgagattagtatctttattcaggttgcccatgtattgggggtattgctgaccctcgtgctggttatattcacgagtgttatcggtatgagtctggtacgtaaccagggctttaagaatttcgtgctgatgcagcaaaaaatggcggcgggtgaaaacccagcggcggagatgattaaaagtgttagcctgatcattgctggtttgctgcttttattaccgggcttttttaccgacttcctcggtcttctacttttattgccgccggtgcaaaagcatctgacagtgaagttgatgccgcatttgcgcttttctcgcatgcctggcggcggttttagcgccgggaccggtggcggtaatacttttgatggtgagtaccagcgaaaggatgatgagcgcgaccgccttgatcataaagacgatcgccaggattaatgtcgaaacgccggattatgtggttatgccattttccggcgtttttcgttttggcagcaacagccataaccccgccagcatgatcagcgcatagagacttttccagccgaccattgccagtaacagaacgcataacagcccgccaaccaccgccagtagtcgataacgtccttgcaataatttacagcctgccagcatgcataacagataaatcataataaagatgccattggcataaataataagagcgtccagattgatctctaaagcatgaatcaccaaagtgctcaccacacagcagccgagcaccgcattgagggcattattcgggatatggcgagaagagaggcgtgccaggtagtggtcaggattatgttgcgcctggctccagaccaggcgggcgaagctctgtatataaatgttgagactggcaaagcaggccagatagccaatcacgcaggcaatccataacgctcctacaccgaacaactgcactacaatttttggaaggcttgctgccgccgccattttttcaccataggcgtcgaagtgtaagacgactaccgtacagccccagtagactaatcctgccagcagcagaccaatcatcaaagcacgaggaaaatcacgctctggatttttaaattcgctggcgagatgggcaaatgcctccagaccgacaaaacaccagaacatcacacttaacgcagcaaataacccggtaagttcgatattaccaggtgccggaaaggggatattcgcaggtttgatatcgcccgcccaccagatagcgacaatcagcgcgacgataagtccggcaataacggtttgtagattagcactggaactggcaccgcgagtaccgatataccacaccagcgccagcgtaccgagttctgccaacaacagttgccagctatgccagccaaacatcgcctggccgaacccggcggcaatttgtagtgcggcaggcaaacccacgggaatgacgcttaaaaacagccagccggtgactcgctcaagccggctaccaaacgccataccgacgaagtgcgcgacgccgcctgcgctgggatagtggcgacccagaatcgcaaacacaatcgcaatcgggaacactaagataatcaaaacgggccacgcccacaggctgttattgcccgctaccagcgcagctaacgcaggaacggcaaacacgccagtgcctaataaactcgtgcttagcaggccaatgccctgggccagccccagttcttgtttgagtccactcatgggttgatgtccgattgcgcccaaattttgggcaactgcgtagattttcgatggtagcacaatcagattcgcttatgacggcgatgaagaaattgcgatgaaatgtgaggtgaatcagggttttcacccgattttgtgctgatcagaattttttttctttttcccccttgaaggggcgaagcctcatccccatttctctggtcaccagccgggaaaccacgtaagctccggcgtcacccataacagatacggactttctcaaaggagagttatcaatgaatattcgtccattgcatgatcgcgtgatcgtcaagcgtaaagaagttgaaactaaatctgctggcggcatcgttctgaccggctctgcagcggctaaatccacccgcggcgaagtgctggctgtcggcaatggccgtatccttgaaaatggcgaagtgaagccgctggatgtgaaagttggcgacatcgttattttcaacgatggctacggtgtgaaatctgagaagatcgacaatgaagaagtgttgatcatgtccgaaagcgacattctggcaattgttgaagcgtaatccgcgcacgacactgaacatacgaatttaaggaataaagataatggcagctaaagacgtaaaattcggtaacgacgctcgtgtgaaaatgctgcgcggcgtaaacgtactggcagatgcagtgaaagttaccctcggtccaaaaggccgtaacgtagttctggataaatctttcggtgcaccgaccatcaccaaagatggtgtttccgttgctcgtgaaatcgaactggaagacaagttcgaaaatatgggtgcgcagatggtgaaagaagttgcctctaaagcaaacgacgctgcaggcgacggtaccaccactgcaaccgtactggctcaggctatcatcactgaaggtctgaaagctgttgctgcgggcatgaacccgatggacctgaaacgtggtatcgacaaagcggttaccgctgcagttgaagaactgaaagcgctgtccgtaccatgctctgactctaaagcgattgctcaggttggtaccatctccgctaactccgacgaaaccgtaggtaaactgatcgctgaagcgatggacaaagtcggtaaagaaggcgttatcaccgttgaagacggtaccggtctgcaggacgaactggacgtggttgaaggtatgcagttcgaccgtggctacctgtctccttacttcatcaacaagccggaaactggcgcagtagaactggaaagcccgttcatcctgctggctgacaagaaaatctccaacatccgcgaaatgctgccggttctggaagctgttgccaaagcaggcaaaccgctgctgatcatcgctgaagatgtagaaggcgaagcgctggcaactctggttgttaacaccatgcgtggcatcgtgaaagtcgctgcggttaaagcaccgggcttcggcgatcgtcgtaaagctatgctgcaggatatcgcaaccctgactggcggtaccgtgatctctgaagagatcggtatggagctggaaaaagcaaccctggaagacctgggtcaggctaaacgtgttgtgatcaacaaagacaccaccactatcatcgatggcgtgggtgaagaagctgcaatccagggccgtgttgctcagatccgtcagcagattgaagaagcaacttctgactacgaccgtgaaaaactgcaggaacgcgtagcgaaactggcaggcggcgttgcagttatcaaagtgggtgctgctaccgaagttgaaatgaaagagaaaaaagcacgcgttgaagatgccctgcacgcgacccgtgctgcggtagaagaaggcgtggttgctggtggtggtgttgcgctgatccgcgtagcgtctaaactggctgacctgcgtggtcagaacgaagaccagaacgtgggtatcaaagttgcactgcgtgcaatggaagctccgctgcgtcagatcgtattgaactgcggcgaagaaccgtctgttgttgctaacaccgttaaaggcggcgacggcaactacggttacaacgcagcaaccgaagaatacggcaacatgatcgacatgggtatcctggatccaaccaaagtaactcgttctgctctgcagtacgcagcttctgtggctggcctgatgatcaccaccgaatgcatggttaccgacctgccgaaaaacgatgcagctgacttaggcgctgctggcggtatgggcggcatgggtggcatgggcggcatgatgtaattgccctgcacctcgcagaaataaacaaacccccgggcagaaatgtctgggggtttttcttttggtcatctttctagtataagattcagacacggacgacgcgagtggcgtccagctcattgattatggggaataacatgcacgtaaaatacttagcagggattgtcggtgccgcgctactgatggcgggttgtagctccagcaacgaattgagtgctgccggtcagagtgtacgcattgtggacgagcagccaggcgcagagtgccagctgattggtactgcgacaggtaagcaaagcaactggctttccgggcaacacggagaagaaggcggttctatgcgcggcgcagcaaacgatctgcgcaaccaggcggctgcaatgggcggtaacgtgatttatggcatcagtagcccgagccagggaatgttgtccagttttgtcccgacggatagccagattatcggtcaggtttataagtgcccgaactgatgtgatccagaggctgggtgacaaacgtataattgcctgatgcgcttcgcttatcaggcctacataaggcattgcaactgattgaatgcttgagaatttgtaggccggataaggcgtttacgccgcatccggcatgaccaacgatcacgttatcagtcatttcaggctggatggctccagcctcgcattagcaaagatgagattatttcgcctgtggtgcagttttgctggtggattgaacacgtaagtgatgcagcgcgcgtaagcattgatcctgggttagcggttgggcgttattcgccgctacggtgcgaacatagacctgacatggcacacccgcgagttttttcagtcgtgggctgaaatcaagcattcggcgagtgatcgcttctatttctttacccggcgttgcttcacgcgttttcaccactgcgccgctaaattgttctttgccactttcatctttaaagcggtaaagcaccgccagataatggtcgaacaagttatgtttccattccggttgggaataggtgtcatattccagattgccattgtcctggcagtcaacgtcgtataacggcaggaaatctaacagactggtaatacgtaatgccagttcacgcatttccgcattattaattgcatgaatgattgctcgcgccagcatttcaatctgcaactcattgacgactaactcacatttgctaccgtcatgtagcgttaatacgaaggtaagattttcgccttgattatcggtaagttccagcgtgttaacccgacgattaatatcggcatttttaagctcatcaaccagaatttctgggatgttttctgccattttcttaatgactttatcgcgagcttgctcatactgaaggtgtgcagcagcatccagtttatgcttttgatgcagacgactttccagcgcaatcagcaggtcgcgcagttccatgacagacataaagaacaagctttctttattgcgaggttctttaattttcagcgccagtgcaatgaaattattactcttgcgaataacaccggtattaacacccttgatgcttatggccatgtaggttctccctaaccatttctcaattaaataattaattttaatttataagccagataaatgggcttggtagtaatagttgttaaaataacataaatagccgtactcactctatataaacagaaaagaaaggttaattattggtgttagctatataaaaagtaacaacagcaatgcatatgaataattaaaggttatgcaacgggcaaagattaaacttcccagtttaatgacaggttgctgtacttgcgtttgttgctcttgccggatgcagcgtaaacgccttatccggcctacagttcattgcaaatccattcaatttcaatgcacgatgtaggcctgataagcgtagcgaatcaggcaattttaatgtttaacttccctgtttaatcagttactgctggcgtagctggagatccagcggcgttttgctgggttcgccgccaatttctcgcgccagtttcggcaccagatatccgctcaccagtgtcagcaactcacgcataatctgccgtgcttcgtcatcactcaccataaaatgcgccgcgccctgtactttatcgagcacatgcaggtaatacggcattacgccggcatcgaacaacgcattactcaggtttgccagcgtttgtgcgttatcgttcacatcacgtaacagaacgctctggttcagcaaagtaacgcctacccggcgcaacttagccatcgcctgacggaatgtttcatctacctcattggcatggttgatgtgattcaccagcaagatttgcagcgtagaacgggcaaagcattcaaccagcgcctcggtgatacgtgccgggatcacaatcggcagacggctgtgaatccgcagacgttttatatgcgggatggcttccagttgtgtgagcaaccagtccagctcgtgatctttcgccatcagcggatcgccgccggagaaaatcatctcgtccagttccggatgcgcagcaacatactcaagtgcagtttgccagttacgcttgttgccctgattttcggcataggggaagtgacgacggaagcaatagcggcaatttaccgcgcagccgcctttgaccagcaaaagcgcccggttgtggtatttatgcaacaaaccaggcactacgctgtgctgttcttccagtgggtcggtggagaatccgggcgcgatgacaaactcatcttggctggtaagtacctgacgcaaaagaggatcgtccggattgcctttctccatgcgatcgataaaactgcggggcacacgcagggcaaaaagctttttggcgctgcgtccggctaacagtttttcctccgcgtctatattcaaaagacgcagaagttcatcaggatcggtcacaacatcggcaagttgcgttaaccaatcttctctggatggggtatttagggttacaatatgcgccattttgtggcttagctaccaattaacaaatttcagagggccttatggcaacgtactatagcaacgattttcgtgctggtcttaaaatcatgttagacggcgaaccttacgcggttgaagcgagtgaattcgtaaaaccgggtaaaggccaggcatttgctcgcgttaaactgcgtcgtctgctgaccggtactcgcgtagaaaaaaccttcaaatctactgattccgctgaaggcgctgatgttgtcgatatgaacctgacttacctgtacaacgacggtgagttctggcacttcatgaacaacgaaactttcgagcagctgtctgctgatgcaaaagcaattggtgacaacgctaaatggctgctggatcaggcagagtgtatcgtaactctgtggaatggtcagccgatctccgttactccgccgaacttcgttgaactggaaatcgttgataccgatccgggcctgaaaggtgataccgcaggtactggtggcaaaccggctaccctgtctactggcgctgtggttaaagttccgctgtttgtacaaatcggcgaagtcatcaaagtggatacccgctctggtgaatacgtctctcgcgtgaagtaatgcggttgtggtgcggcctgcaggctgcaccatcacttattcaggtcagagatgatgaaacgccttatcgttcttgttttgcttgccagcacgctgctcacgggctgtaacaccgctcgcggtttcggcgaagacatcaaacatctcggcaactccatctctcgcgctgccagctaatttttcttctcttccgaaaaatcatcagattcccatcatttttggcgatgttgtctattattaatttgctataggcaaacataaataacattacctaaaaggaagacgttatggtgaagaagacaattgcagcgatcttttctgttctggtgcttagtacagtattaactgcctgcaacaccacgcgtggcgttggtgaagacatttctgatggcggtaacgcgatttctggcgcagcaacgaaagcgcagcaataagcaataacggtacgacagctgtgtcgtgccgtttgttttttctgcgatagtcacaaaggtaatagttgaaattcccctgccacctggcaaaatatccgttcaaccatcagctttgcaggacgacctgcaaacgcctcttttcaccggggacggccccaattctccggagcctgatatgtcctggattatcttagttattgctggtctgctggaagtggtatgggccgttggcctgaaatatacccacggctttagtcgtttgacgccgagtgttattactgtgacggcgatgattgtcagtatggcgctacttgcctgggcgatgaaaagcttaccagtagggacggcttatgccgtgtggacgggtattggcgcagtcggcgcggccataaccggcattgtgctgctcggtgagtccgctaacccgatgcgcctggcgagtctggcgttaatcgtattggggattattggtctgaaactcagcactcattaactaccaggctgctgtacccaaataaatttactgacatcaaacccttcccgggtcgcgactgccagcatctcctgtttcacttcgtcagaaatggttggcgtgcgggagagtatccacaggtagtcgcggtccgggccgcaaaccagcgcatggcggtattcccgatcgagtgcaataacgttataaccgccatagaaaggaccaaagaaactcactttcagcgcagcgcgagttggtgcgccggtaaagtacgctttcccttcactctgctgccacattcctctgtcagggttatagcctttattaatgacattcaggccgccgtcatcacgcaggctgtatgttgcggtgactttttccagtccacgttcaaagcggtgatcaaaacgggcaatctcataccaggtaccgagataacgtttggcgtcgaaattatttactacggtcacgccacgcggcggcgtaggagaactgcaggcaacgaccagaaatgcagctgtcgctgcggcaacgagagggagcaggcgcataaatgtttccttactggtttttttctaagtgtagatgacagcaaggaaaagcggagaaaaggtccgaaaattcggacccgatggaattttactgtagagcgttaagaatctgccaggcggcgtcgactctcgctggattgggatagtttttgtttgccagcatcacgatacccagctctttttctggaataaacgcgacatagctaccaaatccgccggtcgcccctgttttatgtacccaacttgcgcgtactgcaggagttgggggcgtaatcgcttttacggggcgtgctgccagtgcaattttattgtcactgccgttaatgatgctgtcaggatttaccggccagtccagcatttcccagcccaggccctgatacatatcgccggtttgccagtagcgagattgtgccagttgtatcccttgttgaagcgttttctcattgatatcaaggggttttaaattgctttgcacccagcgggccatatcttcaatggtgctcttcacaccataagcttcagcatctaacgccccagggctaacatgcactgccttaccttcgcgatatccccaggcgtaattcttttcttctgcgggcggtacattaatccacgtatggttgagtttgagtggctggaagacacgagtttgcatcgcctgctcaaaactcaaaccagacggcttcacagccagtgcgccgaacaaaccgatactggagttggcatacagacgttgtgttcctggagcccatgcaggctgccagttttgatagaagcgcagcaagtcgctactggatttcacctcatccggcacctgcaatggcaggccgccagcagtgtaggttgcgagatgtaatagtgtgatcccattccactgtttagcggtaagttcaggccagtattttgttgtgggatcgcttaacttgatttcccctcgagcaatagcgtcgccaccaagcacgccagtaaatgttttgctgacgctacctaactcaaacaacgtttgctgtgtgacgggctgctttttggcgatgtccgcatagccccaggtaaagtaataaggtttaccctgataaattaccgccaccgccatacccgggatcttttgttgctctataagcggggtaattgtgcgatgcacaatatcgttgatttgttgaggggcagcaaatgtggagcaagaggcggtaattaataaggcgcagagcgtcgttttgaacatagggtctggtttccatacaaaacggcccgccataggcgggccggatttacattggcgatgcgttagattgtaacgacaccaatcagcgtgacaactgtcaggatagcagccagaccgtagaaaacccatttgcccgcaggtacgtggattttcagatcgtgcatcgcgtggtgcatacggtgtaaaccacaccacagcggcagaacgatcatcaggaacaggaatacgcgaccaatgaagctctgcgcgaacgccagaacgcgctcgtagctcagcgcatcacccggaaacaaccccagtggcagcagaatacccaccagcaggatcatcaccggcgcaatgatggcgctccacataccaccggccccgaagaggccccagaataccggttcgtcagaacgctttggatttggattaatcatctcaggctccttaccagtacagggcaacaaacaggattacgatggtggcaaccacagttaccgcccagagacttttgataattggctctggtcccattttttcgtcttttacaatgatattggccgctttcggtgccagttcaaaccaggttttggtgtgcagcagagctgccgccagagtgatcaggttaatgatcacgataaccgggttttgtaaaaagtcgacgaatcccgcccaggcttccgggccatttttcagggcaaacagcccgaaaatcagttcaatgctgaaccacacagccggaaccgccgtgccttcgcgcagcatgtaaaagcgataaaacggcaattttttccaccaggtggacgtcattggccgtacatacggtttacgtttagtcgtcatgttgcactccttagcgtggtttcagggtcgcgataagaaagtctttgctactttctactttgccctgctgaatggccgcagccggatcgacgtgtttcgggcagacttcggagcagtagcccacgaaagtacagctccatacgccgttctggctgttcaactgcgccatacgctccttcttaccgtggtcgcggctatcttcgttataacgatgcgccagcgtaatggcagccggaccgatgaactctgggttcaggccaaactgcgggcacgcggcgtagcacaaaccacagttgatgcaaccggagaactggtgatacttcgccatctgcgccggggtctggatgttagtaccctgatccgcggtgcgggagttgccgatgatgtacggtttgatcgcttccagactttcgatgaagtgggtcatatcgaccaccagatcgcgttcaatcgggaagttagctaacgcttcaaccttcataccgtcggtgtaatcacgcaggaaggttttacatgccagttttggcacgttgttaaccatcatgccgcaggaaccacaaatcgccatacggcaggaccagcggtagctcaggtccggtgccaggttgtctttgatgtagcccagcgcatccagtaaactggtagttgcgtcataaggcacttcatagaatgcgctatgcggtgcggtatcgacttccgggttatagcgcaccacctcaattttcaggtttttcatctcagccattcgccttctccttcttattggctgcttccgccttatcggctgcatccgcttcgccaccgtaaacgcgtttagctggcggcagcgtagtaatcttcacgtcgctgtactccaggcgagtcgtgccatcagcatcgcggaaggcgagggtgtgtttgaggaagttgacgtcgtcacgctcggtgcaaccttcgtccagacgctggtgcgcgccgcgggactctttacgtgccattgcggagtgcgccatacattcagcaacgttcagaccgtggcccagttcaatggtgtagagcaggtcggtgttgaacacgctggaagtgtcggtgatgcgcacgcgcttgaagcgttcctgcagctctgccagcttgtcgatggttttctgcatcagttccggcgtacggtagataccgcagccttcttccatagccaggcccatttcgtcgcggatcttcgcccagttttcgccgccatcctggttaaccagatctttcagacgttgttcaacgccagctgcctgcgcttcaattgccgcttcgttgccattaccggcagttgctgcacgctctgtcgcttgttcaccggccagacggccgaagaccaccagttccgccagggagttagaacccagacggtttgcaccgtgcagaccaacagaggaacattcacccacggcgaacagacctttaatgcgggtttcacagttctgatcggtttcgataccgcccatggtgtagtgtgcggtcggacgtaccggaatcggttctttaaccggatcgacgccaacgtacgctttcgccagttcgcagatgaacggcagacgttcatgcagttttttctcgccgaggtgacgcaagtcgagataaaccacatcgccacgcggcgtggagatggtgttgcctttacgccattcgtgccagaaggcctgagagactttgtcgcgtggacccagttccatatatttgtttttcggctcgcccagcggagtttccgggcccatgccgtaatcttgcagataacggtagccatttttgttgaccagaataccgccttcaccgcggcaaccttcggtcatcaggataccggaacctggcagaccggttgggtgatactgaacgaattccatgtcacgcagcggaacgccgtggcttagcgccatacccataccgtcaccggtaacgatgccgccgttggtgttgtaacgataaacgcgacccgcaccgccagtagccataacgaccgcgttagcacggatctgcaccagcgtgccttccatcatgttcattgctaccaggccgcgaacatgaccatcatcaaccagaatatccagcacgaaatgttcgtcaaaacgctggatctgcgggaattgcagagaggtctggaacagcgtgtgcagcatatggaagccggtcttatcggcggcgaaccaggtgcgctcgattttcatgccgccgaagcgacgtacgttgacgctaccatccgggcgacggctccatgggcatccccacagttccagttgggtcatttcggttgggcagtggtggacgaaataatccacgacatcctgctcacacaaccagtcgccacccgctactgtatcgtgaaagtgatattcgaagctgtcatgatcctgcgcgacagcggcggagcccccttctgcagcaacggtatggctacgcatcgggtatactttactgattagtgcgatttttgcattcggatttgcctgcgcggcagcaattgcagcacgtaatcccgcgccaccggcgcctacaatggcaagatcggcttgaaaggtttgcacgacattcctccagattgtttttatcccacagccacgtacttcagggtaagtacctgaaagttacggtctgcgaacgctattccactgctcctttataggtacaacagtatagtctgatggataagtctgaaatttgacgagatcgatttttttagtgcgcaagagggctaaattatcactgaagatgattaatttaattactaaaccatcagatcgtgctttttttagtcactgcccaccgctgtttgattcctgcgtaaaatttgtctcgccgtcgcgttgcgagtagacttcgtgcccttgtcaaaaactggagatttaactatgagcgaaacggcatcctggcagccgagcgcatccattcctaacttattaaaacgcgcggcgattatggcggagatccgtcgtttctttgccgatcgtggagtgctggaggtggagacgccttgtatgagccaggcgacggtaaccgatattcatttggtcccgtttgagacacgtttcgttggccccgggcatagccaggggatgaatctctggttaatgaccagcccggaataccatatgaaacgcctgctggttgccggttgtgggccggtattccagctgtgccgcagcttccgtaatgaagagatggggcgttatcacaaccctgagttcactatgctggagtggtatcgaccgcactatgatatgtaccggttgatgaacgaggtggacgatctcttacaacaggtgctggactgcccggcagcagaaagcctttcttatcaacaagctttcttgcgttatctggaaattgacccgctctctgccgacaaaacgcaactgcgggaagtcgcagcgaaactggatttgagcaatgttgctgataccgaagaagaccgcgacacgctgctacaattgctgtttacctttggcgtagagccaaatattggcaaagaaaaaccgacctttgtgtaccactttccagccagccaggcaagtctggcgcaaatcagtaccgaagatcatcgggtcgctgaacgctttgaggtttattataaaggtattgagctggcgaatggtttccatgaattgacggatgcccgtgagcagcaacaacgctttgaacaagataaccgtaagcgcgcggcgcgcggtttgccgcagcaccccattgaccagaatctgattgaagccttgaaagtcggtatgcctgactgttccggcgtggcattaggtgttgatcgtctggtgatgttggcgctgggcgcggagacactggctgaagtcatcgcctttagcgttgaccgggcataattctgaaaaattactgaattaacagcgaagaatggcgtgataagcgccattctgtagcatatgttttcatttttccgttaaaggccacaatttaagactggatatttgatatcatccaggtatcaattctgtattggtttttacgctgcctgctcaatgttgcgcagtgcagttcagtgggcacgtgttatacacgcgctgaaatgaaggatggtttcatgcctcacacgataaaaaagatgagtctgataggactcatattgatgatctttacttccgtatttggatttgccaatagcccaagcgcttattacttaatgggttatagtgcgattcccttttatatattttctgcattgttattctttattccattcgccttaatgatggctgaaatgggagctgcttatcgcaaagaagaaggcggtatctattcctggatgaataatagtgtcggaccacgttttgccttcattggtacgtttatgtggttttcctcttatatcatctggatggtgagtacctccgcgaaagtttgggtaccgttcagtacattcctctatggtagcgacatgacccagcactggcgtattgccggactggagcctacgcaggtggttggtctgctggctgtggcatggatgattctggtcaccgtcgttgcttctaaggggattaataaaattgcccgcattactgcggtgggcggtattgcagtaatgtgtctgaatttagtattgctgttagtaagcattactattttgttattaaatggtgggcatttcgcgcaggatattaatttccttgcaagtccgaacccgggttatcagtccggtctggcaatgctaagctttgtggtatttgccatttttgcctatggcggaattgaagcggttggtggtctggtcgataaaacggaaaatccagaaaagaactttgccaaaggtattgtttttgccgctattgttattagtatcggttatagcctggcaatatttttatggggcgtcagcacaaactggcagcaggtattaagtaatggttccgttaacctcggcaatattacctatgtgctgatgaagagccttgggatgacgctgggtaatgcactgcatttgagtcctgaagcgagtttgagcctgggcgtatggtttgcgcgtattactggacttagcatgttcctcgcctataccggtgcgttctttacgctttgctatagtccgttgaaagccatcatccaggggacgccgaaagcattgtggccggaaccgatgacgcgcctgaatgcgatggggatgccgtctatcgccatgtggatgcagtgcgggttggttactgtcttcatcctgctggttagctttggtggcggtaccgcaagcgcgttctttaacaagctgacgctgatggcgaacgtgtctatgacgcttccttacctgttcctcgcgctggctttcccgttctttaaagcacgtcaggatctcgacagaccgtttgtgattttcaaaacgcatttgagcgcaatgattgcgacagtggttgtcgtactggtggtgacatttgcgaacgtcttcaccatcattcaacctgtggttgaagccggagactgggacagcacattgtggatgattggcggccctgtcttcttcagcctgttagcgatggcgatttaccagaactattgcagcagagtggcaaaaaatccgcagtgggcggtggaataacccgatgccctatcgtctacctgacgatagggcgtaaagacaggaaatgttatggatgacaccagccgggacccggcaataaccgaagatgaaatcagggcgctgcaattttctgccggggatgtagcggaaatagagcagacgattctctcttttgtcgatgcctgccacacccgtaaagtggcgatggtggtgggtagcaccattaacaccctcaaagatcgcgatggtaaacggtggggaaacctgccggatatttattgcgcttatcttatccgatgtctggtttttcgcggggaattagtgggatacggcgatttgtttcgtatgcgctatagcgaaattaagcgaccggttaccttatgagtgcgcgcatgtttgtcttatgctgcatctggtttattgtggcgttcctctggataaccatcacttccgcgctggacaaagagtggatgattgatggacgcgggattaacaacgtctgcgatgtgttgatgtatctcgaagaagacgatacccgtgatgttggtgtgataatgacgttaccgctctttttcccttttctctggttcgctttgtggcgaaaaaaacgcggctggtttatgtacgccaccgcgctggctattttcggctactggctgtggcagttttttctgcgctatcagttttgtttgtgagccggattggttcatccggcacacaaacttacaaacttcccgcctgacgacctttgcccgcagacgtcagcgttctccccgtttgtttaccgttgaggctttccagacgcatctggaagggcgggaatggcatatcgataccgtgggcatggaagccagccagaatcagctggtggatctcatggcgtagcggcatacggtgacccatctcagcggcgtaaatacgcagctcgaaaatctgaatcccctgttgcagatccaccaggaagacttccggtgccgggttgtcgatcaccaggctgcagcgacgcgctgcggtgagcaggatttccgtcacttcttcgctattggcatcggcaggggccggtatcgtcaacaccacgcgcgtgacgctgtcagagaggctccagttgataaactgctcggtaataaacgccttgttcggcacgattatctctttacggtcccagtcgctgatggtggtggcgcgggtgttaattttcgtcacgctaccggtgagatcgcgaattgtcaccgtatcgccaatgcgaatcggtttttcgaacaggataatcagaccagagataaagttggcgaaaatttcctgcaaaccaaaaccgagaccaacaccgagcgcggcaaccagccactgcaatttgctccactcaataccaatcatactgaagccgaccagcccgccaatcagcatcagcagatatttggtgatggtggtgatggcgtaacccgtacccggcgttaaatccaggtgctgcaaaatcgccagttccagcagcgcgggcaagttgcgcaccagctgcgtggtgatgataaacaccagaatggcaatcagcaccgcaccgagggtaattggctccagactttctacgccctgtaccgtggaggtgacatcccacaggctaatattttcgaggaagccgaaagcggaatggatttcactccacagcacaatgacagaaagcagggcgatcaacatcaaaatactgcgcaccagccgcaaggattgcgcactgatggcatcgagatcgacttcgctttcatcgacttcaattgctccttccgggctactgtgatgatgcgcttcctcttcgccacgcgcacgttgcgctaacatctctgcccggcgatgcttcgcccgatcaaacgccagcctgcggcgctggatcagcatccagcggcggataacgtgataaaccaccagtagcaggaaccagatggcaacgctggtttcaagcctcgctaacagcgcctgtgccgttgccagataacccaccgcgctcgccagaatggcaaccaacggcgcgccaatcatcatgttccacagcatatggttggtaatgttgtcgccgctgccctctttgttgagatacagcggaatcccggcctttttcaggctgagggtgaccaccgccagcgcaccgcaaatgaggataaagcaaagccgtcccaggctaccggagaattcacggtcgtcgaggttatcgaacatcatcagcgccataatcagcggcacaataagcccgatgctcatcaggtagtagcgcatcccacgggaaacacgttcgcgcggccagccaaaatgagcgataaacaagccgttcgggcgggcaaaggtggcgcaaatcatcactacccacagcagcggcacggtggccgttacaccatcgccaatcgcgaccgccagcggataaggccacgcctcgcgcaagccgtaacccagcgtcatccacagcaccggtaacggactcgcgacgagaatgctccagaaaagagtgcgcaacgtcagccagaagtgatcctgagtcactttgccaactttcgccgcgctacgttcaagaaaacgggtgaaatagcggcggctgtaaatactgcaaccgaccagaatcaacgcgccaaacagcggcaaaattgtctctttgctggtcagcatcatcacactggctttgcccaactgactgaaggtgtccaggctaatgagacgacgcagatcctgggcgatttccagcggccaggcgatggtcatcgggcgcacgtcagaggtccagaacagatagcggtgcgttgcttcgttcacctctttcagcgcatcctccagttgcccgttggagactttcagcttggtcagttccaatagtagcgtgtcgccaccctgcaacaaactgttcagcaactcacgctgagtgcgcagttgtgcttccagaatacggttttgctcggcagtcagcggctgaccgtcggcctgatgaatttgccgtagcagcggctgtttattaagcagatcctcataacgtaaccgttgcacacgcaactgcgccatttcggtatcaagctgttgtggtttcggcatttccggcagccgtgccacctgcgcccgcagcgcttcgccgagcagattggagcttcccagccattggctctgttcacgcagcgtattcaacgcctgccggacctgtaacgtctggctggcagcctgacgctgttggctggcaacgagatccatccgctgcgcctgttgattcaaagccgcgcttagttcgcggttaattttgaattgcgcgacgatatctttcggcaaatcggcgctgttttctgccagcaattcggtactttccagcgcccgctccgcctcaagctgacgttggctgtttaattgattacgcaaggcctgcaaatacgcatccagttgctggctctctttttccgccagctcactgcgtaagcgcgctaattcctggcggttattggcagacagctgcgccagctccagttcatcaacgagcgccttaagacgtgcagagtcagactgcaacgcgaaattttgtgcctgattgagcggagtattgccggtaagcgttcccaggcggcgctcgatctcatttaactgacggcgggcgtcggtttgctgttgcggcagttgattcaggctatcggcaatctcgcgggcgcgctcctgctcttgctgggcctgacggcttttatccagcaactggctgctgacctggagaatttcctgattcagcgcgtcggtagacattcccgggctcacgctgcgcggctcgtcacgcatgttgtttaattgtgcgcgcagagtagcggagagtttcggataattatcgataacttgctgatattgtttgatgcgctcaagggaaccttttcgttcctcaagcgcatttaaggcagactggagcgcctctacgacttccggctgtgcgggtttcgccgcttttgcctgctccagttcctgagtgatttgtttgctatcgggggccgtcgcggcgtacgccccccaactgaggcaccaggccatcagaaaagtgataatcaggcgcacgtcagcgtttcctttgatggattagacctggtcttttttgtcgtcaaccaatgggctggcgtcgtgttctgcttcgatctcttcagcaggaagcggggcaggttcagcgtctggcgtaacaaaggtttcggtagatactgccagcggctggccaattttcgtgacagacaggctttccagttgctcaaccagattcactttacccggtgcaaacaggttgataacggtggaaccgagtttaaagcgacccatttcctggcctttcagcagtgccacagaaccgtcgttttccccggcaggccaggtccagcgcttgatgataccttcgcgcggcggcgtaatggtgcccgcccagaccgtctcaatgctgccaacaatcgtcgctccgaccagaatctgcgccattgggccaaattcggtatcgaaaaggcaaatcacgcgttcgttacgggcaaacagattcggcacgttctgagccgtgagatggttaacggagaagagatcgcccggcacgtagatcatctcacgcagaataccgttgcacggcatgtgtacgcggtggtagtcacgcggggagaggtaagtggtcacaaacgtaccgttgcggaacaggtccgccatcagatagttgcctgccagcagggcttcgaggctgtagttgtggcctttggcttgcaggattttatcttcttcgattttacccaactggctgataacgccatcggcaggcatgaccagtacattcggatcggtatcgattgggcgtacttcgtcacgcagcggacggacaaagaattcgttaaaggtgcggtagctggcggtgtccggcttttgcgcctctttcatgtcgaccttgtagtatttaacgaacagatcgataaccagttttgtcagccatcctgcccgcttgcttgcgccccaacccgccaggcgagtaagccatagtttcggcagaatgtactgtaggctaagtttaaaactatttaacaaggtagcctccaggccattgttttgtcgttcctgatccggcctacatgccggatcctgaaaaaaaggggacgattctaacgacggttagcttaattgtcagtcatccgtatcagaaaagtttttacgcgtttttacctgcgccatgctttccagaatacggtgatagttttcgaaacgggtttccgcgattttcccttcctcaaccgcttcccggatagcgcagcccggatcggtatcgtgtttgcaatcgcgatatttacacagacctaaatagtcatggaattcgacaaagccctgagtgatttgttccggctccaggtgccagaggccgaactcacgcactcctggggagtcaatcacatcaccgccgtgcgggaagtgatacagccgagcggcggtcgtggtgtgctgaccgagcccgctgttgtcagagatatcgttggtcaggatctctttttgcagccccagcaacgcattcagcaggctggatttgccgacgccagactgcccggcaaaaatgctgatgcgcccggtcaacgcctcttccagcggttttagcccatcctgagtatggctggaaaccatcaatacgcgataaccgatattgcggtagatatccatctgctcgttgacgaacgccatgccttcgtcgtccagcaggtctatcttgttgagcacaataatcggctcaatctgcaaggtttcgcaggccaccaggtaacggtcgataatattgaggctcagctccggcaaaatggcggagacaatgacaatctggtcgatgttggcggcaataggttttacgccgtcgtagaaatccggacgcgtcaacacgctggtacgctcatgcaccgcttccacgatccctttgacatttacgccttccgccgccggtttacccggacgccagactacgcggtcgccggttaccaggctacggatggtacggcgaatattgcagcggtgaacgtcgccatcggcggattccacatcagcgtgcataccaaagcggctgatgacgataccttcatcaggctcgccaaacagattgtcgtcgtagtcgggcttctccttagacgttttaagacgacgctggtgattggcgttcacgcggcgctgctggcctttggagagtttatttttactcaatcgtacagactcctggtcgcccctgatgggcaaaacatctatgatacacgcaattgtggatcaatatagtcactgtgaatgggtggaaaatagcatgagtgccaatgaaaacaacctgatttggatcgatcttgagatgaccggtctggatcccgagcgcgatcgcattattgagattgccacgctggtgaccgatgccaacctgaatattctggcagaagggccgaccattgcagtacaccagtctgatgaacagctggcgctgatggatgactggaacgtgcgcacccataccgccagcgggctggtagagcgcgtgaaagcgagcacgatgggcgatcgggaagctgaactggcaacgctcgaatttttaaaacagtgggtgcctgcgggaaaaagcccgatttgcggtaacagcatcggtcaggaccgtcgtttcctgtttaaatacatgccggagctggaagcctacttccactaccgttatctcgatgtcagcaccctgaaagagctggcgcgccgctggaagccggaaattctggatggttttaccaagcaggggacgcatcaggcgatggatgatatccgtgaaagcgtggcggagctggcttactaccgcgagcattttatcaagctgtaaaatttttcctggtcacgtaagcgccggaatccacttgcggcggcgtgattttgacgctaaattgaacgtcttgctgataatttcagcacttgagataaaaacgcaaaaaaaacttttttggggggttgcagagggaaagatttctcgtataatgcgcctcccgtaacgacgcagaaatgcgaaaattacgaaagcaaaattaagtagtacgcgggaatagctcagttggtagagcacgaccttgccaaggtcggggtcgcgagttcgagtctcgtttcccgctccaaaatttgaaaagtgctgcaaagcacagaccacccaagcgggaatagctcagttggtagagcacgaccttgccaaggtcggggtcgcgagttcgagtctcgtttcccgctccaaaatttgaaagtgctgtaaggcacagaccacccaagcgggaatagctcagttggtagagcacgaccttgccaaggtcggggtcgcgagttcgagtctcgtttcccgctccaaattcttctctcaataaaatatccacagcgacgcgatgcgttattgctggtttttgttgtctctgacaaactcttgtaaacagagttatccacagcctcaggctgtaatcttaatttcaaagaaacttcgcacggtgaatagtatttttttaacctattgatagataagttaaaaattaagattccgttttgtcgagtcgatcacttgacgattttattcgtcttgaattgcaatgcgtttttatttttattcacaagctgtggatgaatcaggcgtcacgcggtaaccctttttcaatcacccgaaccagacgctgttttttcggcaattgcacttcgactatgcacgcatttcgtctctctatttgctgcgcaatcgcccacgctatgtgctcatcgagaagtgggtgctcacctttacgactttccagcgctgtcaaaatcgtttcatcccaaggggcattgcctaatgctacggcgatattacgcagccaacgcaggtgaccaatacgacgaatcgcgcttccttccgtgacttttaaaaacttctcttcgctccaggcgaataactcaatgagttccggtgcgtgtagcggcttacgcgggctgaaatcctcttctgtggtgagttgactatagcgattccacgggcagataagctggcagtcatcgcaaccgtaaatacggtttcccattaacggtcgcaactcttccgggatcgccccttcaagttcgatggtgagataagagatacagcggcgagcatcgacggtatatggctcgacgatggcaccggtcgggcaaatcgtcatacaggccacgcatttgccgcatccttcctcgactggttgatccacgggcagcggaatatcgaccagcaattcgcctaaaaagaagaagctaccggcctcgcgattgaggataagactgtgcttacctgtccagccgagcccagctttttcagctaacgggcgctcgagaataggcgcagaatcgacaaacggtctaaaattcaggctaacacaatgttgctgaatcatctcgcccagctttttgagtcggttgcgcagaagtttgtgatagtcacggcccagcgcataacggctaacatagccgagtttggggtttttcagcgtgctggcaaatgcggcgttagcaggaaggtaattcatccgcacgctgatcacgcgcagcgtaccgggcaataactcatgagggcgagcgcgcagcataccgtgacgtgccatccagtccatttcgccgtggtattgtttgtccagccatgcttgcagtttgggctcggactcgctgagatcggtatcggtaatacctacctgctgaaagcccagttccagcccccactgtttaattttttgcgctaactgattgagatcgaggggctcactcatgacggaccatacaatgaagaaaaaccccgtaagtataccacacaccgtctggtacgccgacgatatccgccgcggagaacgcgaggcggcagatgtgctggggctcacactctatgagctgatgcttcgcgctggcgaggccgcattccaggtgtgtcgtagcgcgtatcctgacgcccgccactggctggtgctgtgcggtcatggtaataacggcggcgatggctacgtggtcgcgcgactggccaaagcggtcggcattgaggtcacgttgttggcccaggagagcgacaaaccgttgccggaagaggccgcgctggcacgcgaagcatggttaaacgcgggtggcgagatccatgctagcaatattgtctggcccgaaagcgtagatctgattgttgatgcgctgctcggtaccggtttgcggcaagcgccccgcgaatccattagccagttaatcgaccacgctaattcccatcctgcgccgattgtggcggttgatatcccttccggcctgctggctgaaactggcgctacgccaggcgcggtgatcaacgccgatcacaccatcacttttattgcgctgaaaccaggcttgctcactggaaaagcgcgggatgttaccggacaactgcattttgacagtctggggctggatagttggctggcaggtcaggagacgaaaattcagcggtttagtgcagaacaactttctcactggctaaaaccgcgtcgcccgactagccataaaggcgatcacgggcggctggtaattatcggtggcgatcacggcacggcgggggctattcgtatgacgggggaagcggcgctgcgtgctggtgctggtttagtccgagtactgacccgcagtgaaaacattgcgccgctgctgactgcacgaccggaattgatggtgcatgaactgacgatggactctcttaccgaaagcctggaatgggccgatgtggtggtgattggtcccggtctgggccagcaagagtgggggaaaaaagcactgcaaaaagttgagaattttcgcaaaccgatgttgtgggatgccgatgcattgaacctgctggcaatcaatcccgataagcgtcacaatcgcgtgatcacgccgcatcctggcgaggccgcacggttgttaggctgttccgtcgctgaaattgaaagtgaccgcttacattgcgccaaacgtctggtacaacgttatggcggcgtagcggtgctgaaaggtgccggaaccgtggtcgccgcccatcctgacgctttaggcattattgatgccggaaatgcaggcatggcgagcggcggcatgggcgatgtgctctctggtattattggcgcattgcttgggcaaaaactgagcccgtatgatgcagcctgtgcaggctgtgtcgcgcacggtgcggcagctgacgtactggcggcgcgttttggaacgcgcgggatgctggcaaccgatctcttttccacgctacagcgtattgttaacccggaagtgactgataaaaaccatgatgaaagcagtaattccgctccctgaataaggaagtgactgataaaaaccatgatgaatcgagtaattccgctccctgatgagcaggcaacattagacctgggcgagcgggtagcgaaagcctgcgatggcgcaaccgtaatctatctgtatggcgatttaggcgcaggtaaaaccacctttagccggggctttttacaggctctgggtcatcagggtaatgtcaaaagccccacttatacgctggtcgaaccctatacgctcgacaacttaatggtctatcactttgatttgtaccgccttgccgatcccgaggagctggagtttatggggatccgcgattattttgccaacgatgccatctgcctggtggagtggccacaacaaggtacaggtgttcttcctgacccggatgtcgaaatacacattgattatcaggcacaaggccgtgaggcgcgcgtgagtgcggtttcctctgcgggtgaattgttgctggcgcgtttagccggttaacctttgaaaggtggcgggatgatgtatcgcatcagaaattggttggtagcgacgctgctgctgctgtgcacgccggtgggtgccgcgacgctctctgatattcaggtttctaacggtaatcaacaggcgcggataacgttgagttttattggcgatcctgattatgcgtttagccatcaaagcaaacgcaccgtggcgctcgatatcaaacaaacgggcgtgattcagggactgccgttgttgttcagcggcaataatctggtgaaggcgattcgctctggaacgcctaaagatgcacaaacgctacggctggtggtcgatcttaccgaaaacggtaaaaccgaagcggtgaagcggcagaatggcagcaattacactgtcgtctttacgattaacgccgatgtgccgccaccgcctcctccgccgcccgtggttgcgaaacgcgttgaaacgcctgcggttgtcgcaccgcgcgtcagcgaaccggcgcgcaatccgtttaaaacggaaagtaaccgcactacgggtgttatcagcagtaatacggtaacgcgtccggcagcgcgcgcgacggctaacactggcgataaaattatcatcgctattgatgccggacacggcggtcaggaccctggcgctatcggccccggtggtacgcgggagaaaaatgtcaccatcgccatcgcgcgtaaattgcgtactttgctcaatgacgatccgatgtttaaaggcgttttaacccgtgacggggattactttatcagcgtgatggggcgcagtgatgtggcacgtaagcaaaacgccaatttcctcgtgagcattcacgctgatgccgcaccgaaccgcagtgcgactggcgcttccgtatgggtgctctctaaccgtcgcgccaacagtgaaatggccagctggctggagcagcacgagaaacagagcgagctgctgggtggggcgggtgatgtgctggcgaacagtcagtctgacccctatttaagccaggcggtgctggatttacagttcggtcattcccagcgggtagggtatgatgtagcgaccagtatgatcagtcagttgcaacgcattggcgaaatacataaacgtcgaccagaacacgccagccttggcgttctgcgcagcccggatatcccaagtgtactggtcgaaaccggttttatcagcaacaacagcgaagaacgtttgctggcgagcgacgattaccaacaacagctggcagaagccatttacaaaggcctgcgcaattacttccttgcgcatccgatgcaatctgcgccgcagggtgcaacggcacaaactgccagtacggtgacgacgccagatcgcacgctgccaaactaaggacgattgatgccaattcaggtcttaccgccacaactggcgaaccagattgccgcaggtgaggtggtcgagcgacctgcgagcgtagtcaaagaactagtggaaaacagcctcgatgcaggtgcgacgcgtatcgatattgatatcgaacgcggtggggcgaaacttatccgcattcgtgataacggctgcggtatcaaaaaagatgagctggcgctggcgctggctcgtcatgccaccagtaaaatcgcctctctggacgatctcgaagccattatcagcctgggctttcgcggtgaggcgctggcgagtatcagtagcgtttcccgcctgacgctcactagtcgcaccgcagaacagcaggaagcctggcaggcctatgccgaagggcgcgatatgaacgtgacggtaaaaccggcggcgcatcctgtggggacgacgctggaggtgctggatctgttctacaacaccccggcgcggcgcaaattcctgcgcaccgagaaaaccgaatttaaccacattgatgagatcatccgccgcattgcgctggcgcgtttcgacgtcacgatcaacctgagccataacggtaaaattgtgcgtcagtaccgcgcagtgccggaaggcgggcaaaaagaacggcgcttaggcgcgatttgcggcaccgcttttcttgaacaagcgctggcgattgaatggcaacacggcgatctcacgctacgcggctgggtggccgatccaaatcacaccacgcccgcactggcagaaattcagtattgctacgtgaacggtcgcatgatgcgcgatcgcctgatcaatcacgcgatccgccaggcctgcgaagacaaactgggggccgatcagcaaccggcatttgtgttgtatctggagatcgacccacatcaggtggacgtcaacgtgcaccccgccaaacacgaagtgcgtttccatcagagccgtctggtgcatgattttatctatcagggcgtgctgagcgtgctacaacagcaactggaaacgccgctaccgctggacgatgaaccccaacctgcaccgcgttccattccggaaaaccgcgtggcggcggggcgcaatcactttgcagaaccggcagctcgtgagccggtagctccgcgctacactcctgcgccagcaagtggcagtcgtccggctgccccctggccgaatgcgcagccaggctaccagaaacagcaaggtgaagtgtatcgccagcttttgcaaacgcccgcgccgatgcaaaaattaaaagcgccggaaccgcaggaacctgcacttgcggcgaacagtcagagttttggtcgggtactgactatcgtccattccgactgtgcgttgctggagcgcgacggcaacattagtcttttatccttgccagtggcagaacgttggctgcgtcaggcacaattgacgccgggtgaagcgcccgtttgcgcccagccgctgctgattccgttgcggctaaaagtttctgccgaagaaaaaagcgcattagaaaaagcgcagtctgccctggcggaattgggtattgatttccagagtgatgcacagcatgtgaccatcagggcagtgcctttacccttacgccaacaaaatttacaaatcttgattcctgaactgataggctacctggcgaagcagtccgtattcgaacctggcaatattgcgcagtggattgcacgaaatctgatgagcgaacatgcgcagtggagtatggcacaggccataaccctgctggcggacgtggaacggttatgtccgcaacttgtgaaaacgccgccgggtggtctgttacaatctgttgatttacatccggcgataaaagccctgaaagatgagtgatatcagtaaggcgagcctgcctaaggcgatttttttgatggggccgacggcctccggtaaaacggcgttagccattgagctgcgtaaaattttaccagtagagttgataagcgttgattctgcccttatttacaaagggatggatatcgggacggcgaagccgaacgctgaagagttactcgccgcgccgcaccgattgctggatattcgcgatccgagccaggcttacagcgctgctgattttcgccgcgatgcgctggcggaaatggccgatatcaccgcggcggggcggatcccactgttagtgggcggtacgatgttgtatttcaaggcattgctggaagggttgagcccgctaccgagcgcagacccggaagtacgggccagaattgagcaacaggcggcagagcaaggttgggagagtttgcatcgtcaacttcaggaggtagatccggttgcggcagcaaggattcatccaaatgatccacaaaggctttcccgggcactggaagtttttttcattagcggtaaaactttaacggaactgacgcaaacgagtggagacgctctaccgtatcaggtgcatcagttcgccatcgccccggcgagccgtgaactgctccatcaacgcattgagcagcgttttcatcagatgttggctagtggttttgaagcagaagtccgggcgctttttgcccgaggagatttgcatacggacttgccttccattcgttgcgtgggttatcgccagatgtggtcttaccttgaaggcgaaatcagttacgatgaaatggtttatcgaggtgtttgcgccacgagacagttggcgaagcggcagataacctggctgcgtggttgggaaggggttcactggcttgacagtgaaaaaccagaacaggcgcgtgacgaagtattacaggttgttggtgctatcgcaggctgaatgtgtacaattgagacgtatcgtgcgcaattttttcagaatcgaaaggttcaaagtacaaataagcatataaggaaaagagagaatggctaaggggcaatctttacaagatccgttcctgaacgcactgcgtcgggaacgtgttccagtttctatttatttggtgaatggtattaagctgcaagggcaaatcgagtcttttgatcagttcgtgatcctgttgaaaaacacggtcagccagatggtttacaagcacgcgatttctactgttgtcccgtctcgcccggtttctcatcacagtaacaacgccggtggcggtaccagcagtaactaccatcatggtagcagcgcgcagaatacttccgcgcaacaggacagcgaagaaaccgaataaggtttcgggctgtttttttacacggggagccagcgatcctgcgttccccgctgatctatttagagggttatacgcttgtttgaccgttatgatgctggtgagcaggcggtactggtacacatctattttacgcaagacaaagatatggaagacctccaggagtttgaatctctggtctcttccgccggtgtcgaagcattgcaggtgattaccggtagccgtaaagcgccgcacccaaagtattttgtaggtgaaggtaaagcagttgaaattgcggaagctgtcaaagcgacgggtgctagcgtcgttctttttgaccatgccctgagcccggcgcaagagcgtaacctggagcgtttgtgcgagtgtcgtgttatcgaccgcaccggccttattttagatattttcgcccaacgtgcgcgtacccatgagggtaagttgcaggttgagctggcgcagctgcgccatctggctacgcgcctggtgcgtggctggacccaccttgaaagacagaaaggcgggataggtttgcgtggtccgggtgaaacccagctcgaaaccgaccgtcgtttgttgcgtaatcgcatcgtgcagatacagagccgcctggaaagagttgaaaagcagcgtgagcaggggcggcaaagccgtatcaaagccgacgttcctactgttagcctggtgggatataccaacgccggtaaatctacccttttcaatcgcatcaccgaagcgcgggtctacgcggcagaccagttgtttgccaccctcgacccgacgttgcggcgtattgacgttgcagatgtcggtgaaaccgtacttgcagataccgtagggtttattcgccacctgccgcacgatctggtggcggcatttaaagccacgttacaagagacgcggcaagccacattactgctgcacgtcattgatgcggcggatgtgcgtgtacaagaaaacatcgaagcggtgaatacggttcttgaagagatcgacgctcacgagatcccaaccctgctggtgatgaacaagatcgatatgctggaagatttcgaaccgcgtattgatcgggacgaagagaacaaaccgaaccgtgtctggctttccgcacagaccggagcggggataccacagctttttcaggctttgacggagcggctttccggcgaggtggcgcagcatacattgcgtctgccaccgcaggaagggcgtctgagaagtcgtttttatcagcttcaggcaatagaaaaagagtggatggaggaggacggcagcgtaagtctgcaagttcgtatgccgatcgttgactggcgtcgcctctgtaaacaagaaccggcgttgatcgattacctgatctaacggcgtagcgtctgaagcgtggagtcatatcctctggcgtcgaaagacaacagggatcaccgcataacaaatatggagcacaaacatggcgtggaatcagcccggtaataacggacaagaccgcgacccgtggggaagcagcaaacctggcggcaactctgagggaaatggaaacaaaggcggtcgcgatcaagggccacctgatttagatgatatcttccgcaaactgagcaaaaagctcggtggtctgggcggcggtaaaggcaccggatctggcggtggcagtagtagccaaggcccgcgcccgcagcttggcggtcgtgtcgttaccatcgcagcggcagcgattgtcattatctgggcggccagtggtttctataccattaaagaagccgaacgcggcgtggtaacacgctttggtaaattcagccatctggttgagccgggtctgaactggaaaccgacgtttatcgacgaagtcaaaccggtgaacgtggaagccgtgcgtgaactggccgcttctggtgtgatgctgacgagcgacgagaacgtagtgcgcgttgagatgaacgtgcagtaccgcgtcaccaatccggaaaaatatctgtatagcgtgaccagcccggatgacagcctgcgtcaggctaccgacagcgccctgcgtggagttatcggtaaatacaccatggaccgcattctgacggaaggtcgtaccgtgattcgtagcgatactcagcgcgaactggaagagacgattcgtccgtatgacatgggtatcacgctgctggacgtcaacttccaggctgctcgtccgccggaagaagtaaaagcggcgtttgacgatgcgattgccgcgcgtgaaaacgaacagcaatacattcgtgaagcagaagcgtataccaacgaagttcagccgcgtgcgaacggtcaggcgcaacgtatcctcgaagaggcgcgtgcgtacaaggcccagaccatcctggaagctcagggtgaagtggcgcgctttgctaaacttctgccggaatataaagccgcgccggaaattactcgcgagcgtctgtatatcgagacgatggaaaaagtgttgggtaacacccgcaaagtgctggttaacgataaaggtggcaacctgatggttctgccgttagaccagatgctgaaaggtggtaacgcccctgcggcgaagagcgataacggtgccagcaatctgctgcgtctgccgccagcctcttcctccacaaccagtggagcaagcaacacgagctccaccagtcagggcgatattatggaccaacgccgcgccaacgcgcagcgtaacgactaccagcgtcagggggaataacgatgcgtaagagtgttatcgcgattatcatcatcgtgctggtagtgctttacatgtctgtctttgtcgtcaaagaaggtgagcgcggtattacgctgcgttttggtaaggtactgcgtgacgatgacaacaaacctctggtttatgagccgggtctgcatttcaagataccgttcattgaaacggtgaaaatgctcgacgcacgtattcagaccatggacaaccaggccgaccgctttgtgaccaaagagaagaaagacctgatcgtcgactcttacatcaaatggcgcatcagcgatttcagccgttactacctggcaacgggtggtggcgacattagccaagcggaagtgctgttgaaacgtaagttctctgaccgtctgcgttctgaaattggtcgcctggacgtgaaagatatcgtcaccgattcccgtggtcgtctgaccctcgaagtacgtgacgcgctgaactccggttctgcgggtacagaagatgaagttactaccccggcggcagataacgccattgccgaagcggcagagcgcgtaacggctgagacgaagggcaaagttccggtcatcaacccgaacagtatggcggcgctgggtattgaagttgtcgatgtgcgtatcaagcagatcaacctgccgaccgaagtgtctgaagcgatctacaaccgtatgcgcgccgagcgtgaagcggtagcgcgtcgtcaccgtagtcaaggtcaggaagaagcggaaaaactgcgcgcgactgccgactatgaagtgaccagaacgctggcagaagctgagcgtcagggccgcatcatgcgtggtgaaggcgatgccgaagcagccaaactgtttgctgatgcattcagtaaagatccggacttctacgcattcatccgtagcctgcgtgcttatgagaacagcttctctggcaatcaggacgtgatggtcatgagcccggatagcgatttcttccgctacatgaagacgccgacttccgcaacgcgttaatataacgactgcggtacaggtcaataaagccaccgcatcctcagggatgtcggtggttttctttttctataaggataatgaatgaatagcacaatctggctggcgcttgccctggttttggtactggaaggtttagggccgatgctttacccgaaggcatggaagaagatgatctctgcgatgaccaatttgcccgataatattttacgtcgttttggcggtggacttgtggttgcgggcgttgtggtctactacatgttgaggaaaacgattggctgaacaaaaaacagactgatcgaggtcatttttgagtgcaaaaagtgctgtaactctgaaaaagcgatggtagaatccatttttaagcaaacggtgattttgaaaaatgggtaacaacgtcgtcgtactgggcacccaatggggtgacgaaggtaaaggtaagatcgtcgatcttctgactgaacgggctaaatatgttgtacgctaccagggcggtcacaacgcaggccatactctcgtaatcaacggtgaaaaaaccgttctccatcttattccaagtggtattctccgcgagaatgtaaccagcatcatcggtaacggtgttgtgctgtctccggccgcgctgatgaaagagatgaaagaactggaagaccgtggcatccccgttcgtgagcgtctgctgctgtctgaagcatgtccgctgatccttgattatcacgttgcgctggataacgcgcgtgagaaagcgcgtggcgcgaaagcgatcggcaccaccggtcgtggtatcgggcctgcttatgaagataaagtagcacgtcgcggtctgcgtgttggcgaccttttcgacaaagaaaccttcgctgaaaaactgaaagaagtgatggaatatcacaacttccagttggttaactactacaaagctgaagcggttgattaccagaaagttctggatgatacgatggctgttgccgacatcctgacttctatggtggttgacgtttctgacctgctcgaccaggcgcgtcagcgtggcgatttcgtcatgtttgaaggtgcgcagggtacgctgctggatatcgaccacggtacttatccgtacgtaacttcttccaacaccactgctggtggcgtggcgaccggttccggcctgggcccgcgttatgttgattacgttctgggtatcctcaaagcttactccactcgtgtaggtgcaggtccgttcccgaccgaactgtttgatgaaactggcgagttcctctgcaagcagggtaacgaattcggcgcaactacggggcgtcgtcgtcgtaccggctggctggacaccgttgccgttcgtcgtgcggtacagctgaactccctgtctggcttctgcctgactaaactggacgttctggatggcctgaaagaggttaaactctgcgtggcttaccgtatgccggatggtcgcgaagtgactaccactccgctggcagctgacgactggaaaggtgtagagccgatttacgaaaccatgccgggctggtctgaatccaccttcggcgtgaaagatcgtagcggcctgccgcaggcggcgctgaactatatcaagcgtattgaagagctgactggtgtgccgatcgatatcatctctaccggtccggatcgtactgaaaccatgattctgcgcgacccgttcgacgcgtaattctggtacgcctggcagatattttgcctgccgggcgaacagtgtgatacattgctgtgtcgggtaagccattacgctatccgacacagtgttaaatcctcgcttttttccttccccgaactgaaataaattagcgacacagcttgtggctggtttatcatcaatataaatgtattttttcccgatttcccttttgaggttgatgtgcagttaacgagtttcactgattacggattacgtgcgctgatctacatggcgagtttgccagaagggcggatgaccagtatttctgaagtgactgacgtctacggcgtctcccgtaatcatatggtcaaaataatcaatcaacttagtcgtgccggctacgtgactgctgttcgtggaaaaaatggcggcattcgcctgggtaaaccggcgagtgcgatacgtattggtgatgtggtgcgcgagctggagcccttaagcctggtgaattgcagcagtgagttttgccacattacacctgcctgtaggttgaaacaggcactttctaaggccgtgcaaagttttcttacggaactggataactacacgcttgccgatttggttgaagagaatcaaccgctttataaattattgctggtggagtgacgaaaatcttcatcagagatgacaacggaggaaccgagatgagtcaagatcctttccaggaacgcgaagctgaaaaatacgcgaatcccatccctagtcgggaatttatcctcgaacatttaaccaaacgtgaaaaaccggccagccgtgatgagctggcggtagaactgcacattgaaggcgaagagcagcttgaaggcctgcgtcgccgcctgcgcgcgatggagcgcgatggtcaactggtcttcactcgtcgtcagtgctatgcgctgccggaacgcctcgacctggtgaaaggtaccgttattggccaccgtgatggctacggctttctgcgggttgaagggcgtaaagatgatttgtatctctccagcgagcagatgaaaacctgcattcatggcgatcaggtgctggctcagccgctgggtgctgaccgtaaaggtcgtcgtgaagcgcgtattgtccgcgtactggtgccaaaaaccagccagattgttggtcgctactttaccgaagcgggcgtcggctttgtggttcctgacgacagccgtctgagcttcgatatcttaatcccgcccgatcagatcatgggcgcgcggatgggctttgtggtcgtagtcgaactgactcagcgtccgactcgccgcaccaaagcggtgggtaaaatcgtcgaagtgctgggcgacaatatgggcaccggcatggcggttgatatcgctctgcgtacccatgaaattccgtacatctggccgcaggctgttgagcaacaggttgccgggctgaaagaagaagtgccggaagaagcaaaagcgggccgtgttgatctgcgcgatttaccgctggtcaccattgatggcgaagacgcccgtgactttgacgatgcagtttactgcgagaaaaaacgcggcggcggctggcgtttatgggtcgcgattgccgacgtcagctactatgtgcgtccgagtacgccgctggacagagaagcgcgtaaccgtggcacgagcgtgtacttccctagccaggttatcccgatgctgccggaagtgctctctaacggcctgtgtagcctcaacccgcaggtagaccgcctgtgtatggtgtgcgagatgacggttagcagcaaaggccgcctgacgggctacaaattctacgaagcggtgatgagctctcacgcgcgtctgacctacaccaaagtctggcatattctgcagggcgatcaggatctgcgcgagcagtacgccccgctggttaagcatctcgaagagttgcataacctctataaagtgctggataaagcccgtgaagaacgcggtgggatcagttttgagagcgaagaagcgaagttcattttcaacgctgaacgccgtattgaacgtatcgaacagacccagcgtaacgacgcgcacaaattaattgaagagtgcatgattctggcgaatatcagcgcggcgcgtttcgttgagaaagcgaaagaaccggcactgttccgtattcacgacaagccgagcaccgaagcgattacctctttccgtagtgtgctggcggagctggggctggaactgccgggcggtaacaagccggaaccgcgtgactacgcggagctgctggagagcgttgccgatcgtcctgatgcagaaatgctgcaaaccatgctgctgcgcagcatgaaacaggcgatttacgatccagaaaaccgtggtcactttggcctggcattgcagtcctatgcgcactttactagcccgattcgtcgttatccagacctgacgctgcaccgcgccattaaatatctgctggcgaaagagcaggggcatcagggcaacaccactgaaaccggcggctaccattatagcatggaagagatgctgcaactgggtcagcactgtagcatggcggaacgtcgtgccgacgaagcaacgcgcgatgtggctgactggctgaagtgtgacttcatgctcgaccaggtaggtaacgtctttaaaggcgtaatttccagcgtcactggctttggcttcttcgtccgtctggacgacttgttcattgatggtctggtccatgtctctagcctggacaatgactactatcgctttgaccaggtagggcaacgcctgatgggggaatccagcggccagacttatcgcctgggcgatcgcgtggaagttcgcgtcgaagcggttaatatggacgagcgcaaaatcgactttagcctgatctccagcgaacgcgcaccgcgcaacgtcggtaaaacggcgcgcgagaaagcgaaaaaaggcgatgcaggtaaaaaaggcggcaagcgtcgtcaggtcggtaaaaaggtaaactttgagccagacagcgccttccgcggtgagaaaaaaacgaagccgaaagcggcgaagaaagacgcgagaaaagcgaaaaagccaagcgcgaaaacgcagaaaatagctgcagcgaccaaagcgaagcgtgcggcgaagaaaaaagtggcagagtgatcaataccctctttaaaagaagagggttagattgctgacaaaatgcgctttgttcatgccggatgcggcgtgaacgccttatccggcctacataatcacgcaaattcaatatattgcagagatcatgtaggccggataaacgtagtgcatcaggcaaaacgtaaacaacgagtacattaatgagcgaaatgatttacggcatccacgcagtgcaggccctgctggagcgcgcccctgaacgttttcaggaagtctttattttaaaaggccgtgaagataaacgtctgttaccgctgattcacgcccttgagtctcagggcgtggttatccagttggcaaaccgccaatatctcgacgagaaaagcgacggtgccgtgcatcagggcattatcgcccgcgtgaagccaggacgtcagtatcaggaaaacgatctgccggatctgatcgctagcctcgatcaaccgttcctgctgatcctcgacggcgtaaccgatccgcacaacctcggcgcgtgcctgcgtagtgcggacgccgcaggcgttcatgcggtgattgtgccgaaagatcgctccgcacagctcaacgctacggcgaaaaaagtagcctgcggcgcggcagaaagcgttccgctgattcgggtgactaaccttgcgcgcaccatgcgtatgttgcaggaagagaatatctggatcgtcggtacggcaggcgaggcggatcatacactctatcagagcaaaatgaccggacgcctggcgctggtgatgggtgcggaaggtgaaggtatgcgtcgcctgactcgtgaacattgcgatgagttgatcagcatcccgatggctggaagcgtttcttccctgaacgttagcgttgcgaccggaatttgcttatttgaagcggtgcgccagcgcagctaatttctcagaattatgaaaagccatccagatttggatggtttttttttgtctatagctggtaagataattacgtattgcaaatattcattttattaatatttaaacttaatctatatggaataatatatgacatggaatccgttggcgctagcgacggcgctgcaaactgtacctgaacaaaatattgatgtaacaaatagcgagaacgcattaattattaaaatgaatgattatggcgatttgcaaatcaatattctttttacttcccgccaaatgattatcgaaacctttatttgtccggtgagtagtatcagcaatccagatgaatttaataccttcttattaagaaatcagaagatgatgccgttgagtagcgtagggatctccagcgtacaacaggaagagtattacattgttttcggggcgttaagccttaaatcttctcttgaagatatcctgcttgagataaccagcctggtagataacgcattggatctggctgaaattacagaagaatatagtcactaattacaaggacgggtatttatgggaattttaaaaagtttatttacgctggggaaaagctttatctcccaggcggaagaatccattgaagaaacccagggcgtgcgcatgctggaacagcatattcgtgacgctaaagctgaactcgataaagccggaaaatctcgcgttgatctgctggcgcgggtgaaattaagtcacgataagctgaaagatttacgtgagcgcaaagccagtctggaagcccgtgcgctggaagcgttaagcaagaacgttaatccgagcttgattaacgaagttgctgaagaaatcgcgcgccttgagaatctcattaccgctgaagagcaagtgttgagcaatctggaagtctcccgtgatggcgtggaaaaagcagttacagcgacagcgcagcgtatcgctcagtttgagcagcaaatggaagtcgttaaagccactgaagccatgcagcgtgcacaacaggctgtaacaacctctaccgttggcgcatcttccagcgttagcacagcggcagaatccttaaaacgcctgcaaacgcgtcaggccgaacgtcaggctcgcctggatgctgccgcacagttggagaaagtcgcagacggtcgcgaccttgacgaaaagctggcggaagccggaattggcggtagcaataaaagtagcgcccaggatgtattagcaagactgcaacgccaacagggcgagtaatttttttgccagcctcgctaaaaggctggcaactattttaaggataaaatatgtctggttttttccagcgtctgtttggcaaggataataagccagctatcgctcgtggtccgctgggacttcatctcaatagtggctttacgctcgacacgttagcgtttcgtttgctggaagatgaattgctgattgcgctgccgggtgaggaatttacggtagccgccgtcagccacatcgatctgggcggcggtagtcagattttccgctactacactagtggcgatgagtttctgcaaatcaataccaccggcggcgaagatattgatgacattgatgatatcaagctctttgtctatgaagagagctacggtatcagtaaagagagtcactggcgcgaggcgatcaacgccaaagcgatgggagcaatgaccttaaactggcaggaaaaacgctggcagcgattttttaacagcgaagaaccgggaaatatcgaacccgtctacatgctggaaaaagtagaaaatcaaaaccatgccaaatgggaggtccataattttaccatgggctaccaacggcaagtaaccgaagatacttacgaatatttgctgctaaatggtgaggaatcttttaacgatctcggcgagccagagtggttatttagccgcgcgttgggtgtcgatatcccgctgacaagtcttcatattattggttaattacaaggacgtttacaatgcatatactggatagtcttcttgcctttagcgcctatttttttattggcgtggctatggtgattatttttctgtttatctattctaaaattacaccgcacaacgaatggcagttaatcaaaaacaataataccgcggcgagtctggcgttcagcggtacattgttgggttacgttatccccttatccagtgcggcaatcaatgcggtgagtattccagactatttcgcctggggcgggattgcactggtgattcagttactcgtttttgctggtgtcagactttatatgcccgcattaagcgaaaaaattattaatcacaataccgcagcaggaatgtttatgggaaccgccgcgctggctggcggtatttttaacgcagcttgtatgacatggtaatggacgatcatggccagaaaacgcaaaagtagaaataacagtaaaattggtcacggagcgattagtcgcattggtagaccgaataatccttttgaaccgtgccgcaatcgctacgcacaaaaatacttaacgttggcgctaatgggcggtgccgcttttttcgtattgaaaggttgtagcgatagtagcgatgtcgataacgacggcgacggaacgttttacgcgacagtgcaggattgtattgatgacggtaataatgccgacatttgcgcgcgtggctggaacaacgccaaaacggcattttatgccgatgttccgaagaatatgactcagcagaactgtcagtctaagtacgaaaattgctactacgacaatgttgaacagagttggatcccggtcgtttctggatttttgttaagccgggttattcgtaaagatcgcgatgagccgtttgtttataacagcggcggttcctcttttgctagccgcccagtctggcgcagcacttctggtgattactcctggcgctccggttctggcaaaaaagagtcttactctagcggcggctttaccaccaaaaaagcgtctaccgtttctcgcggcggctatggtcgttcttccagcgcccgtgggcattggggaggctaatcatgctgagacacaacgttcctgtgcgacgggatctggaccagatcgccgctgacaacggtttcgactttcatatcatcgacaatgaaatctattgggatgagagtcgggcttaccgttttactctgcgccagattgaagagcagatcgaaaaaccgactgcggaactgcatcagatgtgccttgaggtggtggatcgcgcggtaaaagatgaagagatcctgacgcaactggcgatcccgccgttgtactgggatgtgatcgctgaaagctggcgcgcccgcgatcctagcctgtatggacggatggattttgcctggtgtggcaatgcgccggtgaagctgctggagtacaacgccgatacgccaactagtttgtacgagagcgcttatttccagtggctgtggctggaggatgcccggcgcagcggcattattccgcgtgatgccgatcagtacaatgctattcaggaacgcctgattagtcgctttagcgagctttacagtcgggaaccgttttatttttgctgctgtcaggacaccgatgaagacaggagtaccgtgctgtacttgcaggactgcgcccagcaggcagggcaggagagccggtttatctacattgaagatctcggtttgggcgtcggcggcgtactgaccgatcttgatgataatgtcatccagcgtgcatttaagctgtatccgctggagtggatgatgcgtgacgataacggtccgctgctgcgcaagcgtcgcgagcaatgggtggagccgttatggaaaagtatcttgagtaataaagggctaatgccgctgctttggcgcttcttccctggtcatcctaatcttcttgcgtcctggttcgatggcgagaaaccgcagattgccgctggcgaaagctatgtgcgtaaaccaatctatagccgcgaaggcggcaacgtcaccatttttgacggcaagaataacgttgttgaccacgctgatggtgattacgccgatgaaccgatgatctaccaggcgtttcaacctctgccgcggtttggcgatagctacacactcatcggtagctggattgtcgatgatgaagcgtgcggaatggggatccgtgaagataacacactgatcaccaaagacaccagtcgtttcgttccgcattacattgctggataagaatgttttagcaatctctttctgtcatgaatccatggcagtgaccatactaatggtgactgccattgatggagggagacacagtgcactggcaaactcacaccgtttttaatcaacctataccattaaataacagcaacttatacctgtctgatggcgcgctctgcgaagcggtaacgcgtgaaggtgctggctgggatagcgattttctagccagtattggtcagcagttaggaacggctgaatcccttgaactggggcggctggcgaatgtgaatccgcctgaattattgcgctacgatgcgcaaggacgccgtctggacgatgtgcgttttcaccccgcctggcacctgctgatgcaggcgctatgtaccaatcgggtgcacaatcttgcctgggaagaagacgctcgctccggcgcatttgtggcgcgcgcggcgcgttttatgttacatgcgcaggttgaggcagggagcttatgtccgataaccatgacctttgccgccacgccattgttgttacagatgttacccgcgccgtttcaggactggaccacgccgctattgagcgatcgctacgattctcacttattgccaggtgggcaaaaacgcggtttgttgattggcatgggaatgacggaaaagcagggcggttccgatgttatgagcaacaccacccgtgcagagcgtctggaagatggctcttatcggctggtggggcataaatggtttttcagcgttccgcaaagcgatgcgcatctggtgctggcgcagaccgcgggtggtctgtcctgcttttttgtgccgcgctttttgcctgacgggcaacgcaacgcgattcgcctcgagcggctgaaagataagctgggtaatcgctctaacgccagttgcgaagtggagtttcaggatgccattggttggttgttggggctggaaggggaaggaattcgtctgatcctgaaaatgggtgggatgacgcgttttgattgcgccctgggtagccatgccatgatgcgccgtgcatttagcctggcgatttatcatgcacatcaacgccatgtttttggtaatccattgatccaacagccccttatgcgtcatgtcttaagtcgcatggcacttcagcttgaagggcaaacggcgttgctgtttcgtcttgcgcgagcgtgggaccggcgtgccgatgccaaagaagccctgtgggcgcgtttatttacgcctgcggcaaaatttgtgatctgcaaaagaggtatgccgtttgtggccgaagcgatggaggtgctgggcggcattggttattgcgaggagagtgagctgccgcggctttaccgggagatgccggtaaacagtatttgggaaggttccggcaatattatgtgcctggatgtgttgcgcgttctcaataagcaagcgggcgtatacgacttattgagcgaagcatttgtggaagtgaaagggcaggatcgctattttgatcgcgcggttcgtcgtttacagcagcagctgcgtaagccagctgaagaactggggcgagagattactcatcagctattcctgctgggctgcggtgcgcaaatgttgaaatatgcttctccgccaatggcgcaggcgtggtgtcaggtgatgttagatacgcgcggcggcgtacggttgagtgagcagatccagaatgatttattgctgcgggcgacggggggagtgtgtgtgtaagcgtatacgactgatgcgacgctggtttcgattaactaaatgaaatatgtgaaaattgtaggccggacaaggcgctcgcgccgcatccggcattgttcatttgctgtagatgacactcatgcatacagtatcgcctgtacgcgccagttatcaggctgctggtcttcgtacatggtaataatgcggtaccaactcgcaccttgttcatcggcctttaacgccacgatacgttccacgtcctgcggatccccactaatattgctaacactgatctgacctatttcattcaggcccgtcacgcagtcagcactggcgaattctgcagactgtgccgtggcgctcgcaggataagtcactaattgcaggctgggactggcaagtaattgtttcatcgtcagctccatttttcgtttccccacatgttgcagggcattccatcgcggtaataaacgcccaggcttccagccggtaatttattgtgcacaggtaaacgcatagggacgcaaagcaatgtaaagctgactatgtaagttgtctgatttatttacggtacaaaatggcttgactataccactgtcctgtcacgatggtttcgtccaccatgacgacaacgtaataatcagcttttgcagcgacagctttcgctttgatttctgctaatgcgtcatccggagaaccccgaaccatcgtgcttacgctacctattcgctgtaacccttgcgtctggtcgcggcgaatctcttgcggatggtccgttactggcggtgctggctgtggcgtaccttgcagtgcgctacaggcacttaacatcaacaccaataataaactggcaaaccggtaaataacgctattacgtttcctgctaaccatagtgtagtgccttattaatttaactttgggggaatgttcccgaattgttacctggtacgcgattttcgaatgaaaacgtgacgaaagcgtaacccacatctcaacattatgaactaataccgccagcagaaacttgtgctaaggatttcttcatgtcataccagacaaaaaggagagacagatgattgaaatagaaagtcgcgagctggcagatattcccgttcttcatgcttatcctgtcgggcaaaaagataccccgttaccgtgcgtaattttttatcacggctttactagttccagtctggtgtatagctattttgccgttgcgctggcgcaggctggtttgcgggtgatcatgccggatgcgcccgatcacggtagccgttttagtggtgacgcagcgcggcggttaaatcaattctggcaaatcttgctacaaagtatgcaggaattcactactttacgtgcggcaatagccgaagaaaactggctgcttgatgaccgtctggcagtcggtggcgcgagcatgggcgcgatgacggcactggggattaccgctcgccaccccacggtgagatgtaccgccagcatgatgggaagcggctattttacaagtctcgcccgtagtctgtttccaccgctgatacctgaaacggcagcacagcagaatgaattcaataacattgtcgcgccactggcagagtgggaagcgacaaaccacctggaacaacttagtgacagacctctactgctgtggcatggcctcgacgatgacgttgtgcctgccgacgaaagtctacgtttgcagcaggccttaagcgagacgggacgggataaactgctaacctgtagttggcagccaggcgtgcgtcaccgcattacgcctgaggcgttagatgctgccgtgacatttttccgccagcatctttaaacacgcagaatgctgaccccttgcgcttccagttgttgcaggatttccgggttagcatttttgccggtgataagcatatcgatttgatcggcacggctaaaaagcattcccgcgcgttcgccaatcttactgctatcaaccagtaccaccagtttccctaccacgctcagcatcttctgctctgccattgctgtcagcatatcggttttatacaacccttctgcggtcagcccttttccgctggtaaacatccagtgcccggcatagagactgttttcgctgccctgcgggcttaaagtgatggactgacttttgttgtactgtccgcccataatgatcacgctgtcatgttcttgatcgatcaggtaatttgccagcggtagataattagtgatgatttgcactggcttgccacacatttcccgcccaagcagaaacgcggtggagccgcagttgatgactacgctttcgcccggattaaccagctggctggccgctttagcgatacgtactttttcatcgtgattctgcgcctgatgcagattcatcggcgtccagcgcgggcgctgttgggtaatagcttctgcgccattgcgcacttttttcagtttgccgctttcgtcaagtttattgatatcgcgtcgcgcagtggcagggctaattcccagacgctcaacgactttctcaacggtcacaaagcccaattgtgcgagcatttccaggaggatttgatgtctttgtgcttcagtcatgagctattccgataaaatttgatttttttagatgatatttgaaatagccaggaaatactacgccggatagcgcgaacttctccacgctacccggtataaacgacagattacaggaaactcttgaacggcagatccggttcaatagtgaagcaatcatcgaaaccgcgcggatagtggtactcgaagttgtctttatccagcggccaggtaaatttgccacccacctgccagataaacggcttgaagccatacttcaggcgatcttttttcatctcccacagcacgcggatctcttgcggatcggcctggaagttactccagatatcgtggtggaacgggatcactactttcgcattcagcgcttcacccatacgcagcatatcggcgctggtcattttgtcggtgataccgcgcgggttttcgccgtagcttcctaacgccacgtcgatctgatgttcgttaccgtgcttcgcataatagttagagtagtgggagtcgccgctgtgatacagggagccgccaggcgttttgaacaggtagttcaccgcgcgatcgtccatgccatctggcagtacgccagccgctttttgatcggcaggcagggtgatcagtgcagtacggtcgaaagcatcaagcgcatgaatttcaatgtctttcacttttactacatcgcccggtttgaccacgatgcaacgctctttcggtacgccccagccaatccacaaatccacacaggttttcggtccgataaacggtacgtcatctgcacaattctgcatcacggcagcagcgacgttaacgtcgatatgatcgttgtgatcgtgagtcgccagtaccgcgtcgatctggcgaatcgcaaacggatcaagaacaaacggggtggtacgcaggtttggctgcagttttttcacgccagccatgcgctgcatctggtgaccctgtttcattaacgggttaccgtgactttgtttgccagtgccgcaccagaaatcaacgcaaacgttggtgccaccttcgcttttcaaccagatcccggtgcagccaagccaccacatcgcaaatgtgccaggagcgacctgttcttgttcaatttcttcattcaaccagctaccccactccgggaaagtgctcaggatccaggattcacgggtgatacttttcactttactcatcgccatttaccttcatgatagttcaattcgaatcaatatgtgattggttttgattaatcctgacactattttttcaggaaggcaatgaccattttttgactttttgccagggaagttgttgttgattttgagtatggaaagatttaatggaatgtgtaattcaattaactaaatgaatttaaatggataattgtttcgttgtgtgaatcccactctatccatgtggaattatttgcgggtcgcgtcacatttaatcataaataatcttgttgtgattacttttgaaaattagagtgagtgcacaacattccgggtgtgtggaatacccggttacctcttcttcaggagatcgttatggagatcctctacaacatctttaccgtgttttttaaccaggtcatgaccaatgccccgttgttgctgggtattgtgacctgtctgggctacatcctactgcgcaaaagtgtcagcgttattattaaaggcacgattaaaaccataattggtttcatgttgttgcaggcagggtccggcatcctcaccagcaccttcaaaccggtggtggcgaaaatgtccgaagtctacggcattaacggcgcaatttccgatacctacgctagtatgatggcaaccatcgaccgcatgggcgatgcctatagctgggtgggttacgccgtattgttagcgctggcgctgaacatctgttacgtgctgttgcgtcgcattaccggcattcgcacaatcatgttgaccggccacatcatgttccagcaggccgggttgattgccgttacgctgtttatcttcggctactccatgtggaccaccattatctgtaccgcgattctggttagcctctactggggcatcacttccaacatgatgtacaagccgactcaggaagtgacggatggctgtggtttctccatcggtcaccagcagcagtttgcaagttggattgcctataaagtcgcgccgttcctcggcaaaaaagaggagagcgttgaagacctcaaattgccgggctggctgaacattttccacgacaacatcgtctccacggcgattgtgatgaccatcttctttggtgccattctgctctccttcggtatcgacaccgtgcaggcgatggcaggcaaagtgcactggacggtgtacatcctgcaaactggtttctcctttgcggtggcgatcttcatcatcacgcagggtgtgcgcatgtttgtggcggaactctctgaagcatttaacggcatttcccagcgcctgatcccaggtgcggttctggcgattgactgtgcagctatctatagcttcgcgccgaacgccgtggtctggggctttatgtggggcaccatcggtcagctgattgcggttggcatcctggtcgcctgcggctccagcatcctgattattcctggctttatcccgatgttcttctctaacgccaccatcggcgtgttcgctaaccacttcggcggctggcgtgcggcgctgaagatttgtctggtgatggggatgatcgaaatctttggttgcgtctgggcggtgaaactcaccggtatgagtgcctggatgggcatggcggactggagcattctggcaccgccgatgatgcaaggcttcttctccatcggtatcgcctttatggccgtcatcattgtaattgcactggcttatatgttcttcgctggccgcgcgctgcgcgcagaagaagatgcagaaaaacaactggcagaacagtctgcttaataaggagttttgattatgaccgtacgtattctggctgtgtgtggcaacggacaaggcagttccatgatcatgaagatgaaagtggaccagtttttaacccaaagtaacattgaccatacggtaaacagctgcgcggttggcgagtacaaaagcgagttgagtggcgcggatatcatcatcgcttctacgcacattgcgggcgaaatcaccgtgaccggcaacaaatacgtggttggcgtgcgcaacatgctctctcctgccgactttggcccgaaactgctggaagtgatcaaagagcatttcccgcaggatgtgaagtaaggacgcgccatgaaattacgtgatagcctggcggaaaataaatccatccgcctgcaggctgaagcagagacatggcaggaagcggtgaaaatcggcgttgacctgctggtggcggcagatgtggtagagccgcgttactaccaggcgattctggatggcgttgaacagttcggtccttatttcgttatcgctccgggcctggcaatgccgcacgggcgtccggaagagggcgttaagaaaaccggtttctctctggtaacgctgaaaaagccgctggagttcaaccacgatgacaacgatccggtggatatcctcatcaccatggcggcggtcgatgccaatactcaccaggaagtgggcatcatgcagatcgtcaacctgtttgaagatgaagagaattttgaccgtttacgcgcctgccgtaccgagcaggaagtactggatctcattgaccgcaccaacgcggcagcttaagaaggaattgaacatgagtttaccgatgttgcaagtcgcgctggacaaccagactatggatagcgcctacgaaaccactcgcctgattgccgaagaagtcgacattatcgaagtgggcaccattctgtgcgtgggcgaaggcgtgcgtgcggttcgtgacctgaaagcgctctacccgcacaaaatcgtactggcagacgccaaaattgccgatgcaggcaaaatccttagccgtatgtgcttcgaagccaacgctgactgggtgacggtaatttgctgtgcggatatcaacaccgccaaaggcgcgctggacgtggcaaaagagtttaacggcgacgtgcagatcgaactgaccggttactggacctgggaacaggcgcaacagtggcgcgatgcaggcattgggcaggtggtttatcaccgcagccgtgacgcgcaggccgcaggcgtggcgtggggcgaagcggacatcaccgcgatcaaacgtctttccgatatgggcttcaaagtcaccgtcaccggaggcctggcgctggaagatctgccgctgttcaagggtattccgattcacgtctttatcgcgggccgtagtatccgtgatgccgcttctccggtggaagccgcacgtcagttcaaacgttccatcgctgaactgtggggctaaggagcggatatgttgtccaaacaaatcccgcttggcatctatgaaaaagcgctccccgccggggagtgctggctggaacgcctgcaactggcaaaaacgttaggcttcgattttgtcgaaatgagcgtagatgaaactgacgatcgcctgagccgcctcaactggagccgcgagcagcgtctggcgctggtcaatgcgattgttgaaaccggcgtgcgcgtgccgtccatgtgcctttctgctcatcgtcgtttcccgctgggcagtgaagatgacgcggtgcgggcgcaggggctggagattatgcgtaaagctatccagttcgcccaggatgtcggtattcgcgtgatccagctggcgggctatgacgtttactatcaggaagccaataacgaaacgcgtcgtcgtttccgtgacggcctgaaagagagcgttgagatggcaagccgcgcgcaggtgacgctggcgatggagatcatggattatccgttgatgagctccatcagcaaggcgctgggatacgcgcactatctcaacaatccgtggttccagctctacccggatatcggcaacctgagcgcgtgggacaacgatgtgcagatggagttgcaggccggaatcgggcatatcgtcgcggtacatgtgaaagacaccaaacctggcgtcttcaaaaacgtgccgtttggcgaaggtgtagtggatttcgaacgttgtttcgaaacgctcaaacagagtggctattgcgggccgtacctgattgagatgtggagcgaaacggcggaagacccggcggcagaagtggcgaaagcgcgtgattgggtgaaagcgcgcatggcgaaagcgggcatggtggaggcggcataatgcaaaagctaaaacagcaggtatttgaagccaacatggagctgccgcgctacgggctggtgacctttacctggggcaacgtcagcgctatcgaccgcgaacgcgggctggtggtgatcaagcccagcggcgttgcctacgaaaccatgaaagcggccgatatggtggtggttgatatgagcggcaaggtggtggaaggggagtatcgcccatcttccgacactgcgacgcatctcgaactctaccgtcgttacccgagccttggtggcattgtccatacccactccactcatgccaccgcatgggcgcaggcggggctggcgatcccggcgttaggcaccacgcacgccgactacttctttggcgacattccgtgtacgcgcgggttaagcgaagaagaggtgcagggcgagtatgaactgaacaccggcaaagtgattatcgaaacgctgggcaacgccgagccgctgcatacgccgggaattgtggtgtatcagcacgggccgttcgcctgggggaaagatgctcacgatgcggtgcataacgcggtggtgatggaagaagtggcgaaaatggcgtggattgcccgcggcattaacccacaactcaatcacatcgacagcttcctgatgaataaacacttcatgcgtaaacacggtcctaacgcttattacgggcagaagtaaaacacgcgctgcggaaatttccttcctcgggagataactggtctaattccgcagccgtttttcaaaaaaaagccccctgcgaagggggcaaagcaaactatggcaatgtttcgttggttatacctggtgttagcgataaatatccgcgctggcgtgcatattgccgttactccccggttcccgcatcagaattacgtggtagtacgttgcgccttgcgcatctgtttcttcatttaatgcctgacgtgcttcgctttcagtggcgaaattatgattgatataaatcacgcctaagctttgcacatcgtccatatttctggcctggtggttattaatttcaatggctgcccatgtatttgcacttagcaaaagcacagccagaagggctaaaacacgactgaacatagatacctcctcgacggctgactttgtgtgctctcctctgtgatgatcttctgatttaattttaatcaatgataaagaagttgatggtgaccatttctgatgcagttgttcaaaaaaacaccatgatgaagtgtgatgaacttcaaatcagcgtgttagaggttaattgcgaaaggggagatttatttcggctctgcccttgagtttagcgaggcatacaagtactataacgcgtcatttttcagccgacctttaacacgttccttgcctccccgggattcggctgacccagacaggaggctgaataatccgtaaggagcaattcgatgcgtcattacgaaatcgtttttatggtccatcctgaccagagcgaacaggttccgggcatgatcgagcgctacactgctgccatcactggtgcagaaggcaagatccaccgtctggaagactggggccgccgtcagctggcttacccgatcaacaaactgcacaaagcacactacgttctgatgaatgttgaagctccgcaggaagtgatcgatgagctggaaactaccttccgcttcaacgatgccgttatccgcagcatggttatgcgtaccaagcacgctgttaccgaagcatctccgatggttaaagcgaaagacgagcgccgtgagcgtcgcgatgatttcgcaaacgaaaccgctgatgatgctgaagctggggattctgaagagtaatttctgatgaccaaccgtctggtgttgtccggcaccgtgtgcagggctccccttcgaaaggtcagtccaagtggaattcctcactgccagttcgtgcttgagcatcgttctgtgcaggaggaagccggctttcaccggcaggcgtggtgtcaaatgcccgttattgttagcggacacgaaaaccaggccattactcacagtataacggtcggcagtcgcataaccgttcaggggttcattagttgccacaaggcaaagaacggactgagcaaaatggttttgcatgccgagcagattgaattgatagattctggagactaaccatatggcacgttatttccgtcgtcgcaagttctgccgtttcaccgcggaaggcgttcaagagatcgactataaagatatcgctacgctgaaaaactacatcaccgaaagcggtaagattgtcccaagccgtatcaccggtacccgtgcaaaataccagcgtcagctggctcgcgctatcaaacgcgctcgctacctgtccctgctgccgtacactgatcgccatcagtaatcggtcacggtccattaatacgactttgagaggataaggtaatgcaagttattctgcttgataaagtagcaaacctgggtagcctgggtgatcaggtaaacgttaaagcgggctatgctcgtaacttcctggtaccgcagggtaaagctgttccagctaccaagaaaaacattgaattcttcgaagctcgtcgcgctgaactggaagctaaactggctgaagttctggcagctgctaatgctcgcgctgagaaaatcaatgcactggaaactgttaccatcgcgtctaaagctggcgacgaaggtaaactgttcggttccatcggtactcgcgacatcgctgacgctgtaactgcagctggcgttgaagtggctaagagcgaagttcgtctgccgaacggcgttctgcgtaccactggcgaacacgaagtgagcttccaggttcacagcgaagtattcgcgaaagtgatcgtaaacgtagtagctgaataattcgttattcaacgagacgtaaaaacgccgaccattggtcggcgttttgctttctatttttcgtcaggtattagtttcgcaagtagatccattcaccattctcttgtgtccataagtcaggatggtttgctggcgttagatacatacgagcgcaactgatgtctcgctcctgcggcactcgctcgaaacccaaaccgctgtagattgcggcactactacttaaggaacgcagaccaattttcaaatcatggggtaaatcagaatacgcgtttagcaatgcagcaatgatgaatccgagggcattagaaacgcctgtaacagtgcgaagttggtcgatataaagatcgattgttggtagttcagaactccagcaattaggcatttgggcaggaagggttacaacgtatcctatcgtttggccggtatagtctggagtaccataaccaggtcccaaaaccacttcgtgtattgtgtatttactgttgggttcgaaggattcgacatcttgcaataaatatttcagttctgcggttaacctcgcacccgcgtaagctttattgtatttctgggcgtgaatattatctaatgtagcttcatggttccatccaaaagaattatcaccattcattgtgattccatcgtaagcattacacctcgtcgctaacttattgaatgcttgccagtcactgagatctagtttgtggatctcaacagtacgtctgccatcgcaattatgatctcttccacgattactaagtaatgtagcgcgtgcgtattgatgaaattttaattttactggtttgtcggtggagctaaaacgagataaatatgcaggaaaactataaatagtcgttggtaatgtcattgtaatgttacctgtttaatgtttttataaatatcgcagctgaatgttcacagaaaaaaatcgatattaataaaaataagtttgttttctgaagtggtgaaaatagcggatggtgaaagatattaatatcaaaaatcgctcattatggatataacgatgcacccggggagaaaatgacttccacgccttacaccgtacattcttgttgtgcggtatgtaattattctacgctgtcggtatcggtgtattcgttaatcagcaggttagccagccacaaaaagccattgagaaaattattgattttacatgggattattatattgctaatccttggtttttaaaaattgtgcatagtgaaaatcaaagtaaaggtgtgcattatgcaaaaagtcagcgtctcttagaaattaaccatgcgcacttgcagttaatggaatccttattggatgaagggaagaaacacaatatttttaagccagatatcgacccattgcaggtgaatattaatattgctgcgcttggcggatattatttgatcaaccagcatacgcttggcctggtttatcacatcagtatggttagtccccaggcactggaagccagacgtaaggtcatcaaagagacaatccttagctggcttttggttgaccctagttctaccgcgcacgaataattaccgcgcacgaataaaactgccatccggctggcgggtgaacaggacctgttgattattccccgtatcaatggttaagcccgtcaccacgccgctggcgttctggcggattttcaccatctgcccgttttgcaaattactcagcggcttacccgcgccttctacctgcgccattgcatagacatcggtagcgggcagtccgtggtcgcggaacagctgcgccatcgttttaccgggttcgacacggtaagagcgccattgattatcaattccgctatctggctggaatggttgcgtttgggtagtttgcggctgctcttctggctggccttcctgtataggttctggagcgaccggagccacctgatcaggaccattttgtggggtaactaattgcgcccgcagctgttcttctgtcggcggttgactttggctctgaatatctaactgcgcttcacgcgtcaccaccggcgcgttgggcgtatcatcagatggaagcagaaatccgaccaccaatacaatggcggcaataatgatcccccgacgatgcatcggcggcagcgggtccatgaagcgaaaattgtccggcgcgtgccagactttctccagggttggttttagttcaaagcgcccgggcatggtttcctcctgctccgcgtcttgttcctcaatcatagcctatgaataagctaacgctatgatgtccgtggtaaacccgcctttattatattcatacgggatattgctattgtttctttttccctgggatttgtcatcattcccgcgacaaagttttacccaaagaagtgtggctgatatgctgcccgctactttataccctaagaaaggaaatacgatgaccaccccaacttttgacaccatcgaagcgcaagcaagctacggcattggtttgcaggtagggcaacaactgagtgaatctggcctggaagggctgctgccagaagcactggttgcaggtattgccgatgcgctggaaggcaaacatccggctgttccggttgatgtggtgcatcgcgcgctgcgtgaaatccacgagcgcgccgatgccgttcgtcgtcagcgtttccaggcgatggctgctgaaggtgtgaaatacctggaagaaaacgccaaaaaagaaggtgtgaatagcaccgaatctggcctgcaattccgcgtgatcaaccagggtgaaggcgcaattccggcacgtaccgaccgcgttcgtgttcattacaccggtaaactgatcgacggcaccgtgtttgacagctccgttgctcgtggtgaacccgctgaattcccggttaatggcgtgatccctggctggattgaagcactgactctgatgccggtaggttctaaatgggaactgactatcccgcaggaactggcatatggcgagcgcggcgcaggcgcatccatccctccgttcagcaccctggtgtttgaagtcgaactgctggaaatcctctaagcagcgcattctgttcccctcgaacgagaggggagcaggcattcagcaataaacccttcagtttgccaaacggcgctattttgtgttgcaaagaccccgtaagcgtgtatttttgtgagctgtttcgcgttatcaccgtgatatgacactcactttaaacataaaattaacattagatctaaatcttagtattcatcccgcgtattgttacctaatatcgatgagtcccgatacagattcgtcgtatcatagactgactaaaggccgtagagcctgaacaacacagacaggtacaggaagaaaaaaacatggtagatcaggtaaaagtcgttgccgatgatcaggctccggctgaacagagcctacggcgcaatctcacaaaccgacatattcagcttattgccattggcggtgccattggtacggggttgtttatggggtctggcaaaacgattagccttgccgggccgagcatcattttcgtttatatgatcattggttttatgctctttttcgtgatgcgggcaatgggggaattgctgcttagcaatctggaatacaaatcttttagtgacttcgcttccgatttactcgggccgtgggcaggatatttcaccggctggacttactggttctgctgggttgtaaccggtatggcagacgtggtggcgatcacggcttatgctcagttctggttccccgatctctccgactgggtcgccagcctggcggtgatagtgctgctgctgacgctcaatctcgccaccgtgaaaatgttcggtgagatggagttctggtttgcgatgatcaaaatcgtcgccattgtgagcctgattgtcgtcggcctggtcatggtggcgatgcactttcagagtccgactggtgtggaagcgagtttcgcgcatttgtggaatgacggcggctggttcccgaaaggtttaagtggcttctttgccggattccagatagcggttttcgctttcgtggggattgagctggtaggtacaacagctgcggaaaccaaagatccagagaaaagtctgccacgcgcgattaactccattccgatccgtatcattatgttctacgtcttcgcgctgattgtgattatgtccgtgacgccgtggagtagcgtagtcccggagaaaagcccgtttgttgaactgttcgtgttggtagggctgcctgctgccgcaagcgtgatcaactttgtggtgctgacctctgcggcgtcttccgctaacagcggcgtcttctctaccagccgtatgctgtttggtctggcgcaggaaggtgtggcaccgaaagcgttcgctaaactttctaagcgcgcagtacccgcgaaagggctgacgttcagctgtatctgtctgctcggcggcgtggtgatgttgtatgtgaatcctagtgtgattggcgcgttcacgatgattacaaccgtttccgcgattctgtttatgttcgtctggacgattatcctttgcagctaccttgtgtatcgcaaacagcgtcctcatctacatgagaagagcatctacaagatgccgctcggcaagctgatgtgctgggtatgtatggcgttctttgtgttcgtggtcgtgttgctgacactggaagatgacactcgccaggcgctgctggttaccccgctgtggtttatcgcgctggggttgggctggctgtttattggtaagaagcgggctgctgaactgcggaaataaccgcattatcatgctggatggcgcaatgccatccagcttttagatcactcacccgccagcgcgcgtgggaacagtacattgttttccagactgatgtgatccatcaggtcatcaatcagttcattaatgccgttatacatcgctttccaggtggtgcaggcttctggcggcggtgtgacgttattggtggtgtgtttaatcacttccagcagttcgcccgcttcatcgtgctcgctttccattacgctgattggccccattgcctggctgcccatgccttgtttgatcatcgggaagaggatctgctcttctttcatcatgtggctggaaagctcttcatgcagcatggtcaggtattttgtcagcccttttggcacgctcggtttgtcggcgtgaacgcgctcgactttagtcgcttgcagaatcagctccggcagttgctcgcggtgacgatcgtggtagcgcacgatgatatggtcgatgatttctgccagcggggcgctacgccagtctttctcaatcggttgttcagcgagctttgccagttcagcttcaatgacctcaacatccagttctttacgtgccgccgcgcgcgccagcgtctgcttaccgccacagcagtaatccatatcatatttacgaaacagagcactagcgcgaggaatagagagcgccagttcacctaaaggttggtcgcgataagccatagctgatacctcattcttaataagataagatgtattttaaatgcatctttaaggcaaaagctataacccttacgtagcagaggcttatttaactcactgccagcgtgtcaactttcactgacagattcagttaaaggtttttctggttttgctctgaccgcgatgaccacgccaatcactaacagcgcgataccgctcagcgtcattagcggcggcatttgctggcggagtaaaaaggtgtacagcaaacctgccagcgtttcgaaaacaatcagcggcccgagaatcactgtcggtaatagctggctggcgacgttccagcagagtgcgccaacccaactgcaaagcacggctatcgcaaccatcagactaataaacaccagcggacgggggccaaagggtagggagaagtccggcgtttgcgtattcagccagtaacaagcgacgagatagccgataagactaaccggcagtgtgaccagcgcctgcgctgttgcccacatcatcggatgtttgtcgggattttcccgcagccagcgggcgttgcgcagggcataccacgcccagcagaccacggaaactaacgccagcacgatgccagaggtataacgtgcccagtcaaaatcggggagtccgtggtttaactcagcaatattcacacacgccaggccgatgccaatacaaatcagtgctggggcgagttttccccacgcgagtttgccgtcgcgctggctataaagcagattggcaaagacaggaatgaccaccggcagggtgccgataatcatcgtggaaacaggcgcgccagtacgttgaatggcactggcaaggcagaagtaatagatgaggttgcccatcatagtgagcatcaaggcggtaagccagtcgcgacgcgccaactgacgcagacgcacgcgtcccagccaggcaatgggcagcgcaattaaccctaacgccagataacgccccatgctctgcaacatcgccgggtattccggcacgatcaacggcccgacaaaaataagcccccacatcaaccctgctaacagggcgtacagcacgccgctaatcattactggcatccattgatctgtcagaagaaagttcaggaagcagacatgattgctcccggcatcccgtcattatcagagaggatgcgggaggatgccactttaattaattagttattaacattaaaaagatggcttacgctttcggctaacgttgtcgttgggtggccaatcaatttgctaagtgttttgctgtcatcaaacagaccgcctttgcttgcgccaacgtcagaatccgccagcatatccgccagtccgtcgggcagtccgacgcttttcagtgccgcggcgaaatcggcttcgctcagattttgataggtaacctgtttgccgctctgtttggtcagctctgccgctaactgtgtcaacgtccaggcactatcgcccgccagttcgtaaaccttgccttcgtgaccggcttcgctaatcacgcgtgccgcagctgccgcataatctgcccgcgttgcactggcgattttgccatcgcccgccgcaccgataaatacgccgtgttccagtgctgccggggcgctggcgaggtagttttcgctgtaccagccgttgcgcagcagggtgtaaacgatgccagaatcagccagcattttctccgtctcgatgtgctcatcggcgaggccgagcggggaggtatctgcatgtagcaggctggtataagcgataaatttcacgccagccgcctttgcggcattaataacattacgatgctgcggggcacgttgacccacttcgctggaagagatcagcagtagtttttccactccctgaagtgcagatgtcagtgcggcttcatcgccgtagtcagcctgacgcacggtaatgccttgtgctgccagggcttgggcttttgccggattacgaacgatagccactatttggctggcaggaaccgttttcatcaaggattcaataacatagtgaccaagttggccagtggcaccagtaatagcgatcatgggaagtctccatcgttttgtcttgtgtttaaatacgctaacacctaaacttacttttagtaagtacgtacaaaaaggtaagtatgaaatgagtcaggttagcctgagccaacaactgaaagagggtaatctctttgcggaacagtgcccgagccgcgaggtgttgaaacacgtcaccagccgttggggggtgttgattctggtggcgctacgcgaaggtactcatcgctttagcgacctgcggcgcaaaatcggtggggtgagtgaaaagatgcttgcgcagagcttacaggcgttagaacaggatggttttcttaaccgtatcgcgtatccggtggtgccgccgcatgtggaatatagcctcacgccgctgggcgagcaggtgagcgaaaaggttgctgcactggcggactggattgagttgaatttgcccgaggtgttggcggtgcgggatgaacgtgcggcataactgccggatgcgctgagcttatctggtctacggtgcatggcttgtagggcggataagatgcgccagcatcgcatccgccaataaatgccggatgcggttgatgatttataggccgaaaaagaagtgttttacttactcaaatccacctgataaatcgcaaacccgatatcatcggtcgcgactttattcatcggatactgccctttctctttaataaacgctgcggctttatcactcggagaggtttcgaaacggatatccagtttcttatcgccagctatcggtgctaaacgccagttgttatctgccgccgggtgaatttcccccgcacgtttgctctcatcagcaatccacgctgccagcacgctgcggttctcatccggactagcaaaagcgatatggctgtcgcccgtaccggcaaatttgccgccgtaagcgcgatagttattggtggcaaccaggaacatggcgttcggatcaatcggcttgccattaaaggtcaggttcttaatcctttccgcattggcattaatcatctggcactcgccgtcataacgggcgggctgggtaacatcaatctgataattcacaccatcaataacatcaaagttataagtgcggaaaccatcccagttgatgagactctgtggtttcgtgctgttgggatcaatctggttaaactgtcccgcggagcactccagccactctttcacctctttaccgctggctttcaccacaatcagcgtattgggatagagataaagatcggcggcattacggaaggtcaactggcctttttccacctccacatagcttgccgggtcatttttgcgaccaccgactttaaacggtgcggcagcactaagcaccggcagttttgccagatccggatcgccctgaatgtaatgctcgacatacgctttttgcgcgttgttcaccacctgcacggtcggatcgtcctgcaccagcgccagatagctatacatattgtcggcagatttaccgattggcttgctgacgaactggcgtgtggcatcgtgatcggctttgagtgtttctaccagcttgctgtcttccgccgcgagggattttttattagcgatgtcgtaaatcggtcgtgcttccgctttcgcctgcgtcacctgccatttaccgctgtcattactgagttgtaagtcgaccacaccaagatgatcgccccacatgcctggcattaccgccggaacaccattcagcgtgcctttggcgatatcagccccttcgatatcagcaaaatctttacctgggaaaacggcgtgagcatggccaaacataatggcgttaacgcccggaatttcactgaggtaataaacactgttttccgccatcactttatacggatcggcagatagcccggaatgtgccagaacgacaacaacatcggcacctttctcgcgcatttcaggcacgtatttgcgcacggtttcggtaatatcattcaccgtcactttcccggataaattagctttatcccagcccatgatttgtggtggcacgacgccaatatagccaatcttcagcgtctgtttttttccgtctttatcgaccacttcggtgtctttaattaaatacggtgtaaacattggctgtttggttctggcgtcaatgacgttggcatttacataagggaatttcgctcctgccagcgcatttttcaggtaatccagaccgtagttaaactcgtggttgccaagcgttccgacggtatagtccagcgtatttaatgccttatagaccgggtgaatatcacctgcttttaatcctttcgcgctcatgtaatcggccagcggactcccctgaatcaaatcgccgttatcaaccagtacgctgtttttcacttcattgcgggcatcgttaatcaggcttgccgtacgtaccagtccgaatttttccgtggcggtgtctttgtaataatcgaaatccatcatgttgctatgcagatcagtggtttccatgatacgcagatcgaccgtcgctgcattcacactggcggcaatcagcgtggccaggagcgttgcgctaaacttaatcatcagggacatccttttatcatcgggaatacgaaagaaaagggagaataaacgtcttacttatagaacagtgaagaatgccacaattttacgctttgaaaatgatgacactatcacagttggcgcattcattaacgatagggtataagtaaaacaataagttaacaccgctcacagagacgaggtggagaaatgttagatcaagtatgccagcttgcacggaatgcaggcgatgccattatgcaggtctacgacgggacgaaaccgatggacgtcgtcagcaaagcggacaattctccggtaacggcagcggatattgccgctcacaccgttatcatggacggtttacgtacgctgacaccggatgttccggtcctttctgaagaagatcctcccggttgggaagtccgtcagcactggcagcgttactggctggtagacccgctggatggtactaaagagtttattaaacgtaatggcgaattcaccgttaacattgcgctcattgaccatggcaaaccgattttaggcgtggtgtatgcgccggtaatgaacgtaatgtacagcgcggcagaaggcaaagcgtggaaagaagagtgcggtgtgcgcaagcagattcaggtccgcgatgcgcgcccgccgctggtggtgatcagccgttcccatgcggatgcggagctgaaagagtatctgcaacagcttggcgaacatcagaccacgtccatcggctctagcctgaaattctgcctggtggcggaaggacaggcgcagctgtacccgcgcttcggaccaacgaatatttgggacaccgccgctggacatgctgtagctgcagctgccggagcgcacgttcacgactggcagggtaaaccgctggattacactccgcgtgagagcttcctgaatccggggttcagagtgtctatttactaaattcagatggcagaaacagtgtatttcctgattctgccatcctgatttctcccaacctaaaaagttataaataaaaagagattgtatttaaagtgcaaaaattcaattgctaataagttacattttaataatgagcgttttttgatagtttacttctatagtgagatatttaatggcgacataaagtaaccaaataaaataaggttgtcatatgttacccaggatcagacacaataattttattggtgcggtggagttatttgtaaagtctagctatacaaaaacacatagtaacaatttttttaacaacatccatcatgcatttaagaaaaaagattggattagcaattatgatagcctgttaactttgagggagttctttcgttgcgcaactcagattgataaaagtggttatcaggtgcttagtagtaaaaatgaaactgttcacgccatggataagtttcttatcagtttcagccttaaagataacggtgccgaatatacaatgacattgcgaggtagtggatttgaatacgaagaaatacccataacaataaatgaatataacagtttcatggatttcaaaaaccgtgaatttccgttagaacaaaacagacgattgtatgcccgggatattctacagaaaaaacagtctgacataccgaaaaggattaaaggttatattcaccaggcgattggtgacgtgtctttaggttatgccttattggaggatatagtaagcaaattaaaacggggtaaatttgaactccaaataccaggaggtggaattaaagaatgcgatggatggtatatttacgaaaaaataattgatgataattttgccatagtcatagaatctttgggctttgcgcttaaaatctatggaggggatgaacgttttcgtaatggttcctctgttgttttggaggatgaagattactctcttatttataattttctggttaatgcaggttgccaacaagtcgaattagccgaacaagtggatgcgatagtaagtgcgaatctggccgcagatagcgatattaccaaagaaaagatttgcgagaaatataaaagcaccattgaggcgtttaaaaaagagcaactagcgttaccagtattagttcggcgtaagaacagtgagacttaattcccctatcccatagataacgataggggaaaattatttttgcagaatttatgttattgccattatttgagcaacttttgcagcaggtccatcacttgctgcacctcttccggtgtgagcgccccgtctttggcccattgcacgcgaccatccttatccagcaccactacagcggaactttcttcatccagctgccaggcaccgagcgcgacgccattgctatcgacaataaactggctccagggataaagctttttattactctccagactgctgcgcacaaacatcccactacccggaatcgcgtcgtcggtgttaacaatggtggtggtctggtaacgatcgtgcggtaacttcgcacttttaatcgcttcaatcagcgtcgcgtttttctcttttgcagaggtgcgaccagcaatatgttgcagtactcgcacttttcccactaactgcgcgctgttccaggttttgtagctaaactgatctttatcaagcaccaactcgccccgatcggtaatgccaatcggcggcactcgctgaccggtttcgaactgatgtgcggaagccatcatcggcaacagcaggcaggtgagtgccagaatcttgcgtagggtcatggtgtttccttcttatgatatgcaggtgatccgaccacttgggtctgagttttaatcatatgtgctatttatcgaatttcccgcaagtgtgatgccagtttgcggtcaagcgcacaaatcatatgaaaaatgaatgcttatactgaagaccgcgcttcggtaaaaagataattctgaataattgtaacctttaggtaaaaaaagttatacgcggtggaaacattgcccggatagtctatagtcactaagcattaaaatttgcgcctcataatagttgggccgattgtggcaccgcacaggcgtaatactcagcaggagataacaatgaaaattttccaacggtacaacccacttcaggtggcgaagtacgtaaagatcctgttccgtggacggttatacatcaaggacgttggcgcttttgaattcgataagggtaagattcttatcccaaaagtgaaggataagctgcatttgagtgtgatgtccgaagttaaccgtcaggttatgcgtctgcaaacagagatggcttaaccaaagtgctatgcagtaaaaagtgctatgcagtaataagacggctcctgattcaggagccgttgatgtttctgggggttacgcgacgctttcttctttatctttagcgtcaggcagttttgggctaagggcggtggccttgctgtcgatccgggtcaccagcagctggtcgatgcggtagttatcgatatccaccacttcaaatttgtagccggcgaatttcacgctatcggtgcgtttcgggatcttacgcagcataaacatcataaagccgccgatggtttcgtagttgccgctctgcgggaactcgtcaatatccagcacgcgcatgacgtcgtcaattggggtgccgccgtcaatcagccaactgttctcatcacgggcgacaatctgctcttccagcccctgaccgaccagatcgcccatcagcgtggtcatcacgtcattgagggtgatgatccccaccaccagcgcgtactcgttcatgatcaccgcgaagtcttcacctgcggttttaaaactttccaacgcctcactaagggttaacgtatccggcacaatcagcgtgttgcgaatttgtacgccgctgttcagtgccaggctttggttagccagcacgcggttcagcaggtctttagaatcgacataaccgatgatgtggtcaatatcttcattacagacgaggaacttagagtgcggatgttccgccaccttattcttcaggctttgctcatcttcgtggagatcaaaccaaatcacgttttcacgcggtgtcatactagacggaacggtacgggattccagctcaaagacgttttcaatcagctcgtgttcctgtttacgtaacacgcccgccagcgcaccggcttccactaccgcgtagatgtcatcagaagtgatgtcatctttacgtaccattggcagtttgaaaatacggaagattatgttcgccaggccgttgaagaaccacaccagcggggtgcaaacgtacaggcagaagcgcatcgggttgatgatacgcaaagccacagcttctggcgcaatcataccgatgcgtttcggggttaaatccgcaaacaggataaacatgccagtcactaagctgaaagagagaataaagctcagttgctcagagagctctgcgctcatatagcgggagaacaggctgtgaaaagctggagaaaatgccgcatcaccgacgataccgccgagaatcgccactgcgttcagaccgatttggaccacggtaaagaacatgccgggattttcctgcatattcagaacgcgttgggcatttatattgccttcatcagccagcagtttaagtttgattttgcgactggcggcaaggctgatctcggacatgctgaagaacgcacttacagcgatcaagcagagtatgactaaaatactgtttaacatatcttatccgacctttcaggccagatcctcggaaggggaagttgattaatttgtgtgaaatacacattgaaagccgattcgaagaaagtgaaccggcattttcagtggctagtatagcgtaaggtactgtaaagccgccagagggttaaaattcagacagctgaaaaatgcaaaactgcctgatacgctatgccgatcaggcctacgcagtccttgcaatatattgaatttggacgattttgtaggcctggtaagtcgtttacgccgcatcaggcatagacaaagagcactttatcaacaaactacatttgtacccgtaacgttatgcttccggcggcagacagacgccaattccgccaattccacagtaaccatacgggtttttatgcagatattgctggtggtcatcttcggcataataaaacggtgtggcgttagcgatttccgtggtgatgtgacgatcgtcatcggcggcaagcatcgccgcctgaaaacgttccagactggcgcgagctgcggcatcctgttctggggtcagcggataaatcgcactacgatactgcgtgccgtggtcattgccctgacgcattccctgggcgggatcgtgattctcccaaaatacctgtagcaactgctcatagctgatgacggaaggatcgtaaacaatgcgtaccgcttcggcatgacccgtatcaccggagcacacttcccgataagtcggatttggcgtatagccgccggtatagcctgcggcggtgctgtaaacgccgggtaactgccagaacagacgctccacaccccagaaacaacccatcgcaaaaatggcaatctccattccgtcaggtacattggtcatactgtgaccgttgaccgcatgcagcgtggctacgggcatcggggtgttacgtccaggcagggcatcggcgggggaaaccagatgctttttatcaaataaactcatggtgtcgctctcccgaaaatcggtcattggggttaaggttgtaacaagaggcgtatttgcacacaataaccaccgtgaataggtctaaagtaaaacataagaaatatttggggtttagtctgctttttaatccatattactggatttttgttaagccgtttaacggcgttccaggggcaggaaaaaaggatattcaggagaaaatgtgcgctatatccgacagttatgctgtgtaagcttactctgcttaagcggatctgccgtcgccgcgaacgtccgtctacaggtcgaggggttaagcggacagctggaaaagaacgttcgtgcgcagctttctacgattgaaagtgatgaagtgacgccagaccgtcgctttcgcgcacgcgtcgatgatgccatccgcgaaggtctgaaagcgctgggttattaccagccgaccattgaatttgatctccgtccaccgccaaagaaagggcggcaggtattgatcgccaaagtcacgccaggcgtgccggtgttaattggcggcaccgatgtggtattgcgcggcggcgcgcggaccgataaagactatttgaaattgctcgatactcgcccggctattggcacggtactgaaccagggcgattatgaaaatttcaaaaagtccttaaccagcattgcgttgcgtaaaggttatttcgatagcgaatttaccaaagcgcagctgggcattgcgctcggcctgcataaagccttctgggatattgattataacagtggcgaacgttaccgctttgggcatgtgacctttgaaggaagtcaaatccgcgatgaatacctgcaaaatctggtgccgtttaaagagggcgatgagtacgaaagcaaagatctggcagaactgaaccgccgactttctgctaccggctggtttaacagcgtggtggtggctccacaatttgataaagcgcgcgaaacgaaagtattaccattgacgggcgtggttagcccgcgaacagaaaacaccatcgaaaccggggtcggttactctacggacgtgggaccgcgcgtgaaagcgacgtggaaaaagccgtggatgaactcttatggtcacagtctgaccaccagtactagtatttccgcgccggaacagaccctcgacttcagctataaaatgccgctgctgaagaatccactggaacaatattatttggtgcagggcggttttaagcgcactgacctgaacgataccgaatctgactccactacgctggtggcttctcgctactgggatctctccagcggctggcagcgtgccattaacctgcgctggagtctcgaccactttactcagggtgaaattaccaataccacgatgctgttttatcctggggtgatgattagccgcacgcgttctcgtggtggcctgatgccaacctggggcgacagccaacgctactctatcgactactccaacacggcctggggtagtgatgtcgatttctccgttttccaggcgcagaacgtctggatccgcacactgtacgatcgccatcgttttgttacacgcggcacgctgggctggattgaaaccggtgatttcgacaaagtaccgccggatctgcgtttcttcgccgggggcgaccgcagtattcgtggctacaaatacaaatctatcgctccgaaatacgccaacggtgacctgaaaggggccagcaagttgataaccggaagcctggaataccagtacaacgtgaccggaaaatggtggggcgcggtgtttgtcgatagtggcgaagcggtaagcgatattcgccgcagcgactttaaaaccggtaccggggtcggcgtgcgctgggaaagcccggtcgggccaatcaaactcgattttgccgtaccggtcgcggataaagacgaacacgggttacagttttacatcggtctggggccagaattatgagtttatggaaaaaaatcagcctcggcgtggttatcgttatcttactgttgctgggaagcgtggcgtttctggtgggcaccaccagcggcctgcatctggtatttaaagcggcggatcgctgggtgccaggactggatattggcaaggtcaccggcggctggcgcgatctcaccttgtctgacgttcgttatgagcagccaggcgtggcggtaaaagcgggcaatctgcatctggctgtcgggcttgagtgcctgtggaacagcagtgtttgtattaatgatctggcgctgaaagacattcaggtcaacatcgacagtaaaaaaatgcctccttctgaacaggttgaagaagaggaagatagcggtccgctggatctctccacgccgtatcccatcaccctgacacgggtggcactggacaacgtcaacattaagattgatgacaccacggtaagcgtgatggacttcacctccggcctgaactggcaggagaaaaccctgaccctgaaaccgacgagcctgaaaggcctgctgattgctctgccgaaagtggcggaagtggcgcaggaagaagtggtcgaaccgaaaattgaaaatccgcagccggatgaaaagccgctcggcgaaacgctgaaagatctcttttctcgcccggtattgccggaaatgaccgacgtgcatttgccgcttaacctgaacattgaagagtttaagggcgagcagctgcgcgtgacgggcgacacggacatcaccgtgagcaccatgctgctgaaagtgagcagcattgacggcaatactaaactggacgccctggatatcgattccagtcaagggatcgtcaacgccagcggcacggcgcagctgagtgacaactggccggtggacatcactctcaacagtacactgaacgtggagccgttgaaaggtgaaaaagtgaagctgaaaatgggcggcgcgctgcgcgaacagctggagattggcgttaatctttccggtccggtggatatggatttacgcgcccagacgcgactggcggaagccggattgccgctcaacgtggaagtgaacagcaaacagctttactggccgttcactggtgagaagcagtatcaggcggatgatctgaaactgaaacttaccggcaaaatgaccgattacacgctctctatgcgtacggcagtgaagggacaggagatcccgcccgcgactattaccctcgacgccaaaggtaatgaacagcaggtcaatctcgacaaactcaccgtcgcggcgctggaagggaaaactgaactcaaggcgttgctcgactggcaacaggccattagttggcgcggtgagctaacgcttaacggcattaacaccgccaaagagttcccggactggccgagcaaactcaatggcttgattaaaacccgcggtagcctgtacggcggcacctggcagatggacgtgccggagttgaagctgaccggtaacgttaaacagaacaaagtgaacgttgacggcacgctgaaaggcaacagttatatgcagtggatgatcccagggcttcatctggaactcgggccaaacagtgccgaagtgaaaggcgagctgggggtaaaagatctcaatcttgatgccaccatcaacgcgccggggctggataacgcgctgccggggcttggcggtacagcgaaagggctggtgaaagtacgcggcacggtggaagcgccacaactactggcagatatcaccgcgcgcggcctgcgctggcaggaactttccgtggcgcaggttcgcgtggaaggcgatatcaaatccaccgatcagatcgccgggaaactcgacgtacgcgttgagcaaattagccagccggatgtaaatatcaacctcgtcaccctgaatgccaaaggcagcgaaaagcagcacgagctacagttgcggattcagggggagcctgtctccgggcagcttaatctggcaggaagttttgatcgcaaagaagaacgctggaagggaactcttagcaatacccgcttccagacgccggttggcccgtggagcctgacccgcgatattgcgctggattaccgcaataaggagcaaaaaatcagcatcgggccacactgctggcttaacccgaatgcggaactgtgcgtgccgcaaactatcgatgcgggggccgaagggcgtgcggtggtgaatctcaaccgcttcgacctcgccatgctgaaaccgtttatgccagaaaccactcaggccagcggtatcttcacgggtaaagcggacgttgcctgggacaccacgaaagaggggctgccgcagggcagtatcacccttagcgggcgtaacgtgcaggtaacgcaaaccgtcaacgatgcggcgctgcccgtggcgtttcagacactgaatctgacggcggaattgcgtaacaaccgtgccgaattgggctggaccatccgcctgaccaataacggccagtttgatggacaggtgcaggtgaccgatccgcaaggccgccgtaatcttggtggcaacgtcaatatccgtaacttcaaccttgcgatgataaaccccatctttacccgtggggaaaaagcagcggggatggtgagtgccaacttgcgtctgggtggtgatgtgcaaagcccgcagttgtttggtcagcttcaggttacgggtgtggatatcgatggcaactttatgccgtttgatatgcaaccgagccagcttgcggtcaactttaacggtatgcgcagcacgcttgccggtacagtacggacccagcagggtgaaatctacctgaacggtgatgccgactggagccaaattgaaaactggcgggcgcgggtaacggcgaaaggcagtaaagtgcggatcaccgtgccgccgatggtacgaatggatgtaagcccagatgttgtattcgaggctacaccaaacctgtttaccctcgatggtcgcgtggatgtcccttgggcgcgcatcgtggtgcacgatctgccggaaagcgcagtaggcgtctccagcgatgtggtgatgcttaacgataacctgcaaccggaagagccgaaaacggcgagcattccgattaacagtaacctgattgtccacgttggcaacaatgtgcgcattgacgcctttggcctgaaagcgcggctgacgggcgatctcaatgtcgttcaggacaaacaagggctgggtctgaacgggcagatcaacatccctgaagggcgcttccatgcctatggtcaggatctgattgtgcgtaaaggtgagttactgttctctggtccgccagatcaaccgtatcttaatattgaagctattcgtaacccggatgctacagaagacgacgtaatcgccggagttcgcgtcactggtctggcggacgaaccgaaagcggagatcttctctgacccggcgatgagccaacaagctgccttgtcttatttgctacgtggacaagggctggagagcgatcagagcgacagtgcggcaatgaccagcatgctgattggtttgggggttgcgcaaagtggccagattgtgggtaaaatcggcgagacgtttggcgtaagcaatttagcgctcgacacccagggagtaggcgactcctcccaggtagtggtcagcggctatgtattgccaggtctgcaagtgaaatacggcgtgggtatatttgactctatagcaacactcacgttacgttatcgcctgatgcctaagctatatctggaagccgtgtctggtgtagaccaggcactggatttgctctatcagttcgagttttaacaatgcgaatatttgtctacggcagtttacgccacaaacaaggcaacagtcactggatgaccaatgcccagttactgggcgatttcagtatcgataactaccagttgtatagcctgggccactatccaggcgcagttccggggaacggaacggtacacggtgaagtttatcgtattgacaacgccacgctggccgaacttgatgccttgcgcaccaggggcggtgaatacgcgcgccagttgattcagacgccgtacgggagtgcatggatgtacgtttatcaacgacccgtcgatggattaaagctaattgaaagcggcgactggttagacagggataagtaaccatatgcatacgccaccttcgggtggcgttgttttttgcgagacgactcgcattctgttttgtaattccctcaccttttgcttttctctccgagccgctttccatatctattaacgcataaaaaactctgctggcattcacaaatgcgcaggggtaaaacgtttcctgtagcaccgtgagttatactttgtataacttaaggaggtgcagatgcgtattaccataaaaagatgggggaacagtgcaggtatggtcattcccaatatcgtaatgaaagaacttaacttacagccggggcagagcgtggaggcgcaagtgagcaacaatcaactgattctgacacccatctccaggcgctacagccttgatgaactgctggcacagtgtgacatgaacgccgcggaacttagcgagcaggatgtctggggtaaatccacccctgcgggtgacgaaatatggtaaagaaaagtgaatttgaacggggagacattgtgctggttggctttgatccagcaagcggccatgaacagcaaggtgctggtcgacctgcgcttgtgctctccgttcaagcctttaatcaactgggaatgacgctggtggcccccattacgcagggcggaaattttgcccgttatgccggatttagcgttcctttacattgcgaagaaggcgatgtgcacggcgtggtgctggtgaatcaggtgcggatgatggatctacacgcccggctggcaaagcgtattggtctggctgcggatgaggtggtggaagaggcgttattacgcttgcaggcggtggtggaataaggtgtgtttatttatcgcgggcataaaaaaacccttactaaccgaagcccggcgttcagggttattacgccagaagaacttatttattctttgcgcgctcgaaggaggcaacgatttcagctttagcggcttctgcgttttcccaaccttcaactttcacccacttgcctttttcgaggtctttgtagtgctcgaagaagtgagcgatttgcgctttcagcagttcaggcagatcgttaacgtctttaatgtgatcgtattctttgctcagcttgctgtgcggaaccgcaaccagtttcgcatcttcaccggcttcgtcggtcattttcagaacgccaaccggacggcaacggatcacagaacccggctgcagcgggtacggagttgggaccagtacgtcaaccgggtcaccgtccagagacagggtgtggttgatgtaaccgtagttgcatggatagaacatcgcggtggacatgaagcggtcaacgaacagtgcgccgctctctttgtcgatttcgtatttgatcggatctgcgttagccgggatctcaataacaacgtagatgtcttccggcagatctttacccgcagggacgttgagtaagctcatgtctgtttcctttaaaaatatgtggcaaacaagtgccgagtattatagccaactcgcgccgaatgtcttcgcttgttttcgtcttcattttcctttttcaccagttttaagacggtatacagagcaggaaaatccataaccgtagccgcatttttcatagtgagatgaaagcgattacaaacttgtgattaacgttttatttacttttttgaagtgtgatgtaacgcaatctgttacataacgaattgtctatagttttttcgcgaacatcttttaaccaataataactaccccgacgaggacaaccctatgtggaaacgcttacttatagtctctgcagtcagcgcagccatgagctctatggcgttggccgctccattaaccgttggatttagccaggtcggaagcgaaagtggctggcgtgccgcagaaaccaatgtggcgaaaagtgaagccgaaaagcgcggaatcacgttgaaaattgccgatggtcagcaaaagcaggaaaaccagattaaagcggtacgttccttcgttgcacaaggggtggatgcgatctttatcgctccggtggtcgcgacaggttgggaaccggtattaaaagaggcgaaagatgccgaaatcccggtattcttgctcgatcgttccattgatgtgaaagacaaatctctctatatgaccaccgtcactgccgacaacatcctcgaaggcaagttgattggtgactggctggtaaaagaagtgaatggcaaaccatgcaacgtggtggagctgcagggcaccgttggggccagcgtcgccattgaccgtaagaaaggctttgccgaagccattaagaatgcgccaaatatcaaaatcatccgcagccagagtggtgacttcacccgcagtaaaggcaaagaagtcatggagagctttatcaaagcggaaaacaacggcaaaaacatctgcatggtttacgcccataacgacgacatggtgattggtgcaattcaggcaattaaagaagcgggcctgaaaccgggcaaagatatcctcacgggttccattgacggtgtaccggacatctacaaagcgatgatggatggcgaagcgaacgccagtgttgaactgacgccgaatatggcaggtcccgccttcgacgcgctggagaaatacaaaaaagacggcaccatgcctgaaaagctgacgttaaccaaatccaccctttacctgcctgataccgcaaaagaagaattagagaagaagaaaaatatggggtattgagggttgctatgcctgatgccgattcgtaggccggataaggcgctcgcgccgcatccggcgatggtgcactgaagcctgatgcgacgcttaccgcgtcttatcatgcctactgggagcacgctttacaccgggggaaaccatgacgaccgaccaacaccaggagatcctccgcaccgaaggattaagtaaatttttccccggcgtcaaagcgttagacaacgttgatttcagcctgcgccgtggcgaaatcatggcgctgctcggtgaaaacggggcgggaaaaagtacgctaatcaaagcattaactggtgtataccacgccgatcgcggcaccatctggctggaaggccaggctatcagtccgaaaaataccgcccacgcgcaacaactcggcattggcaccgtctatcaggaagtcaacctgctacccaatatgagcgtcgctgataatctatttataggccgcgaacccaaacgcttcggccttctacgccgcaaagagatggaaaagcgcgccaccgaactgatggcatcttacggtttctccctcgacgtgcgcgaaccgctcaaccgctttagtgtcgcgatgcagcaaatcgtcgctatttgtcgggctatcgatctctctgccaaagtgctgatcctcgatgaacccaccgccagtctcgacacccaggaagtggagttactgtttgacctgatgcgtcagttgcgcgatcgcggcgtcagcctgatttttgtcactcactttctcgatcaggtctatcaggtcagcgatcggatcaccgtcttacgcaacggcagtttcgtaggctgtcgggaaacgtgcgagctaccgcagatcgaactggtaaaaatgatgctggggcgcgagctggatacccacgcgctacagcgtgccgggcgaacattgttgagcgacaaacccgttgccgcgttcaaaaattacggcaaaaaaggaacgatcgcaccgtttgatctcgaagtacgccccggcgagatcgtcggtctggctggattgctgggaagtggacgtaccgaaaccgccgaagtgatcttcggtatcaaacctgctgacagcggcacggcgttgatcaaaggcaaaccgcaaaacctgcgaagcccacatcaggctagcgtactgggcattggcttctgcccggaagacaggaaaaccgatggcatcatcgctgccgccagcgtgcgggaaaatatcatcctcgctctccaggcccagcgcggctggctacgtcccatttcccgcaaagaacagcaagagattgccgaacgctttatccgccagcttggcattcgcacacctagtactgaacaaccgattgaatttctctccggcggcaatcagcaaaaagtgttgcttagtcgttggctactgacccgaccgcaatttctgatcctcgatgagccaacccgcggcattgatgttggtgcccacgccgagatcatccgcctgattgaaacgctatgcgccgatggtctggcgctgctggtgatctcctccgaactggaagagctggtgggctatgccgatcgggtgattatcatgcgcgatcgcaaacaggtggcggagatcccgctggcagagctttccgttccggcgatcatgaacgccattgcggcgtaaggagaacagtgtgatgcctcaatctcttccggacaccactacgccaaaaaggcgctttcgctggccgacggggatgccgcagctggtagcactgttgctggtgctgctggtcgatagcctggtagccccgcatttctggcaggtggtgcttcaggatgggcgtttgttcggtagccccatagacattcttaaccgtgcagctcccgttgcgttactggcgattggcatgacgctggtgatcgccaccggtgggattgatctctccgtaggggcggtgatggctatcgccggagccacaacggctgcgatgacggtcgcgggattcagcctgccgattgttttgttaagcgccctgggcaccggcatcctggcgggattgtggaacggcatactggtagcgatcctcaaaattcagccgtttgtcgccactctgatcctgatggtcgccgggcgcggcgtggcgcaactgatcaccgccgggcagatcgtcacgtttaacagcccggatctcagttggttcggcagtggaagcctgttgttcctgccaacgccggtcattatcgcggtgctgacgcttatcctgttctggctgttgacccgcaaaacggcgctggggatgtttatcgaagccgttggtatcaacattcgggcggcaaaaaatgccggggtaaacacgcgaatcatcgtcatgctcacttatgtgttgagcgggctgtgtgcggcgattgcgggcattatcgtggcggcggatattcgcggtgccgatgccaacaacgctgggttatggctggagctggacgccattctcgcggtggtgattggcggcggaagcctgatgggcgggcgctttaacctgctacttagcgtggtgggggcgctgattattcaggggatgaacaccggaattttgcttagcggctttccgccagagatgaaccaggtggtgaaagcggtggtggtgctttgcgtgctgattgttcagagccaacgctttatcagtctgattaaaggagtacgtagccgtgataaaacgtaatttgccactgatgatcaccatcggcgtctttgtgttgggttatctttactgcctgacccagtttcccggttttgcttccacaagagtgatctgcaatatcctgaccgataatgcctttcttgggatcattgccgttggcatgacctttgtgatcctcagtggtgggatcgatctctccgtcggtagcgtgatcgcctttactggcgtgtttctggcaaaagtgattggcgatttcggcctcagcccgctgctggcgtttccgctagtgctggtgatgggctgtgccttcggcgcatttatggggcttctgatcgacgccctgaagatcccggcatttatcattacgcttgcggggatgttctttttgcgcggcgtcagctatctcgttagcgaagagagcattccgataaaccatcccatttatgacacgctcagtagccttgcgtggaaaatccctggcggcggtcgcttaagtgcgatgggactgctgatgttggcggtggtggttatcggcatattcctcgcgcatcgtacccgttttggtaatcaggtatacgccattggcggcaacgcaacgagcgcgaatctgatggggatttccactcgcagcaccactattcgcatttatatgctctccaccggactggcaacgctggcggggattgtcttcagcatttatacccaggccggatatgcgctggcgggcgtaggtgtggaactggatgctatcgccagtgtggtaattggcggtacgcttttgagcggtggcgttggaacggtattagggacgctttttggcgtggcgattcagggactgattcagacttacataaactttgatggcacgctgagttcctggtggacgaaaatcgccatcggtattttgttgtttatttttatagcattacagcgtggattaacggtgctgtgggagaatcgtcagagtagcccagtgacaagagtcaacattgcgcagcaataaaaacgcctctccgtgtggagaggcgcaggagattacgcgtccgggaactcacggataaagcgttcgacatcttcaaccatatggtcgttgccgacaaagaaactacggcgctggtgcagggtttccgggatgatatccagaatacgctctttgccatcgctcgctttaccgcccgcttgttccgccaggaatgccatcgggttgcactcatacagcaaacgcagtttgccgtccgggtggctggcggtgcttgggtagagataaataccgcctttcagcaggttacggtggaaatccgcgaccagactaccgatataacgactggtataagggcggttggtggatttatcttcttcctggcagaatttaatgtacttcttcaccccgttcggaaacttaatgtagtttccttcgttgatggagtaggttttgcctttctccgggaagcgcatccgttcctggcacaggcagaaaacgccgaggctaggatcgtaagtaaaggcgtgaacaccgcatccggtggtgtaaaccagcatggtagaggagccgtataccacgtaacctgccgcaacctgtttgttaccaggctggaggaaatcttcttccgttaccggcgtgccaacaggcgtaacgcggcggtagatggagaaaatggtaccgacagagacgttaacatcgatgttggagctgccatccagggggtccatcagcaccacgtattttgcgtgttcacagccttcaaagacgacaatctcatcttcttcttcagaggcaatgcccgcaacgatatcgcgtgctttcagtgcggctttcagtttttcattagcgaacaagtcgagtttctgctgaacctcgccctgcacgttctcagcaccgctggcacccaggatatcaaccagtcctgctttgttgatatcgcgatggataatcttggcgcccagttttattgcgctcagcaaagcagtgagctcaccggtagcatgagaaaactcgtgctgcttttcgacaataaattcacctaacgttttcataaaactttccctgcaatgtttatggagtaaagcgaccgcaacaatcttaacaaataatctcaatgttgcgctcaggtgaatcgcgccagcaaattacggattatcctgaaatgcgtttctcacttgcccgacatatgcgtaaaatgagcggcagattaaaaaaggatagtgacgtatgcgcattcatattttaggaatttgtggcacatttatgggcggtctggcgatgctggcgcgccagttaggccatgaagtaacgggtagcgacgccaatgtgtatccgccgatgagcaccttacttgagaagcaaggcattgagctgattcaggggtacgatgccagccagctcgagccgcagccggatctggtgattattggcaacgccatgacccgtggaaatccgtgtgtggaagcggtactggaaaaaaatatcccttatatgagtggtccacagtggctgcacgattttgtgctgcgcgaccgctgggtgctggccgttgccggtacacacggcaaaaccaccaccgcgggaatggcgacctggattctggaacagtgtggttacaaaccgggctttgtaatcggcggtgtgccggggaactttgaggttagcgctcatctgggcgaaagcgacttctttgttatcgaagcggatgagtatgactgcgccttcttcgacaaacgctctaaatttgttcattactgcccgcgtacgctgatcctcaacaaccttgagttcgatcacgccgatatctttgacgacctgaaagcgatccagaaacagttccaccatctggtgcgtatcgttccggggcagggccgtattatctggccggaaaatgacatcaacctgaaacagaccatggcgatgggctgctggagcgagcaggagctggtgggtgagcagggtcactggcaggcgaaaaagctgaccaccgatgcttccgaatgggaagttttgctggatggcgaaaaagtgggcgaagtgaaatggagcctggtaggcgaacataatatgcacaatggcctgatggcgattgcagcggctcgccatgttggtgtagcgccggcagatgccgctaacgcgctgggtagctttattaatgctcgtcgccgtctggagttgcgtggtgaagcgaatggcgtcacggtatatgacgattttgcccatcacccgacggcgattctggcaacgctggcggcgctgcgtggcaaagttggtggtacggcgcgcattattgctgtgctggagccgcgcagcaataccatgaaaatggggatctgcaaagacgatctggcacctagtttaggtcgtgccgatgaagtcttcctgctgcaaccggcgcatattccgtggcaggtggcagaagtggcagaagcctgcgttcagcctgcacactggagtggcgatgtggatacgctggcagatatggtggtgaaaaccgctcagcctggcgaccatattctggtgatgagcaacggcggttttggtgggatccatcagaaactgctggatgggctggcgaagaaggcggaagccgcgcagtaattcggccttagccagatatagtatgcgtaggccggataaggcgttcacgccgcatccggcatttgagcatagtgcctgatgcgacgcttgatgcgtcttatcaggcctacaggtgcaccgtatccggcaaaccatactcacatcaacaacgaaaattacccttcgttctccgctaactcgcgcagatactggaaaatctggcgtgcggatttcggcggcttattcccttctttctctttcttcgcgttgcggatcagagtacgcagttgctgacgatcggcatcgggccacagatttaatacctcagcgatggcgtcatcaccttgatcgatcagacgatcgcgcaggttttccagtttatggaacagcaccacctgctggttgtgacggtttttcagcttatccagcgcctgacgaataggctctacgtcgcgctggcgcagcatcttaccgatgagctgcaactggcggcggcgaccttccatcttaatacgctgggcgagctcaatagccgcgcgcagatccgcatctaacgggatcttatccagcgcgtttttccccagatcaacaatttccgcgccaaggcgttttagctcctcggcatcacgtttaatttcacttttactgacccagataatttcatcgtcttcgtcttcgatgtcatcaccgggaacgtcgtcgagccagtcttcgggctgcttagtcatctcaggctccttaaaaaaagaggctaatgttaccagttaagatgcgcactgaaaaacggttctctgttagacttcagagaaactctctacattatggcacttgcaatgaaagtaatctctcaagttgaagcgcagcgcaagattctggaagaagcagtttccactgcgctggagttggccagtggcaaaagcgacggtgcggaagttgccgtcagcaagaccaccggcattagcgtaagcacgcgttatggtgaagtggagaatgttgaattcaatagcgatggcgcgctggggatcactgtttatcaccagaaccgcaaaggtagcgcaagttccaccgatttaagcccgcaggccattgcccgtactgtacaggcggcgctggatattgcccgttataccagcccagatccctgtgccggcgtggcagacaaagagctgctggcctttgacgcaccagatctcgacttgttccaccctgcggaagtttccccggatgaagccattgaactggcggcccgcgcagaacaggcggcattgcaggcggacaaacgcatcaccaataccgaaggtggcagctttaacagccactacggtgtcaaagtttttggcaacagccacggcatgttgcagggttactgcagtacgcgtcatagcctctccagctgtgtaattgccgaagaaaatggcgatatggagcgtgattacgcctacaccattggtcgtgcgatgagcgatctgcaaacgccagagtgggttggggccgactgtgctcgccgtactttaagccgtctgagtccgcgtaaactctccaccatgaaagcgccagtcatttttgccaatgaagtggcaaccgggctttttgggcatctggtgggggcgatagcgggtggaagcgtttatcgtaaatctaccttcctgctggatagcctgggtaaacaaattctgccggactggctgaccattgaagagcatccgcatctgctgaaagggctggcgagcacgccattcgacagcgaaggtgtgcgcaccgagcgtcgcgatattattaaagatggcatcctgactcagtggctgctgaccagctacagcgcgcggaaactggggctgaaaagcaccggacatgcgggcggtattcacaactggcggattgccggacaaggtctaagcttcgagcagatgctcaaagagatgggcaccgggctggtggtgacggaattgatgggccagggcgtgagtgccattaccggtgattattcccgtggtgcagcgggcttctgggtagagaatggcgaaattcagtatccggtgagcgaaatcaccatcgcaggtaatttaaaagatatgtggcgcaatattgtcaccgtcggtaacgatattgaaacacgcagtaatatacagtgtggttctgtgctgttgccggagatgaaaatcgccggacagtaaaaaaactggcgcgacctgccgcgctataaactaaaaaattacacaaaatcattcgcactgcatcgagacggaaagtgaatgagggccggggagcgtactcgcagtacgtgacccggtcgaatgagcgtagtcgtcgatgaggcagtgtgaaggatgaagtgtaaataaaaaaggaactattcttgcagtctcctcgttggtattcagttcggcgtcatttgctgctgatctcgaagacaatatggaaaccctcaacgacaatttaaaagtggtcgaaaaagccgataacgcggcgcaagtcaaagacgcgttaacgaagatgcgcgccgcagcgctggatgcgcaaaaagcaacgccgccgaagctcgaagataaaagtccggacagcccggaaatgaaagatttccgccacggtttcgacattctggtcggtcagattgacgacgcgctgaagctggcaaatgaaggtaaagtaaaagaagcgcaggctgctgcagagcaactgaaaacgacccgcaatagttatcacaagaagtatcgttaattcctcatttccctgttgcctgcactcaggtaacagggaacttatcatcgcaaatgatgcaccacctgattgctgctgccgcgccagatcagggaagggtcttttaaatcctgcacaaatttgccgtcgaccagcacgttaatcaaatcaacaacctgcatttgcgcagcgttgagttcgtcgagtttatagcctgtccacacccagatgtctttacccggacactcggcgcggatgcgttgtaccagtttcagaatatccggcacgttttgcggatgcagcggatcgccgccggagagggaaataccctggcgtttgatacgagtgtcattcagatcgttaatgatctggtcttccattgctttggtaaatggctgaccggaatttacccgccatgtgcttttgttatagcaaccggggcattcatgaacacacccggagacaaacagggtgcaacgagtgccggggccgttgacgatgtcgacaggatagtactgatgataattcattatttcgcctggcttatcagtccgcgtgtaggctgcatccggtaatcaatgcctgatgcgacgctgtcgcgtcttatcagacctggagcaattgccaaatgtaggccggataaggcgtttacgccgcatccggcatttgcttagctcagagtgaagattaacctatctgcccattccccaaatgtttaacgcggcgcttaacttcttcctgcttaccagcgttaaacggacgtgcatccgggctacctaaatatccgcacacgcggcgagttacgctcacacgggaggcgtcatggttaccacatttcgggcaagtgaagcctttgctggtgcactcgaactcaccggtaaagccacactcgtagcactcatcaatcggtgtattggtgccgtaatacggtacatgctgatagctgtaatcccagacatcttccagcgccttcaggttgtgctgaatgtttggatactcgccgtagcaaatgaaaccaccgttcgccagcggcgggtaaggcgcttcaaagtcgatcttgtcgtacgggttcaccttcttctccacatcgaggtggaaactgttggtgtagtaacctttatcggtcacgcccggcaccacgccaaactcagcagtatcgagacggcagaagcgatcgcacaggttttcactcggcgtgctgtagagactgaaaccataacccgtttcttctttccactgatccactgcctgacgcagacgttcaacaatggcgatacctttcgcgcgaagctgctcgttgtcgtaaacatgctcgccgccgaacagcgcgttaatggtttcgtggatgccgatgtaacccaggctaatagacgcacgaccgtttttgaagatttcagaaacatcatcgtcagcattgagacgcacgccacaagcaccttccatatagaggatcggggccacgcgcgctttcacgccttcgagacgagcgatacgggtcatcagcgccttacgtgccagcaccagacgttcatccagcagcttccagaaggtggcttcatcgccttttgcttccagagcaatacgcggcaggttcaggctgatcacgccgaggttgttacgaccatcgtggatctgctcgccgttttcattttcccacacgccgaggaagctgcggcagcccatcggagttttaaagctaccggtgactttcactacctgatcgtagttcaggatatccggatacatgcgcttgcttgcgcactccagcgccagctgtttgatgtcgtagttcggatcgccttttttatggttcaggccatcgcgaatcgcaaacaccagtttcgggaacaccgcagttttacggtttttaccgaggcctgcgatacggttacgcaggatgctttcctgaatcaggcggctttcccagctggtgcccaggccaaaaccaaaggttacaaacggcgtctgaccgttggcggtgtgcagggtgtttacttcgtactccagactctggaaggcatcgtagcactctttgatggttcgagagttagcgtagccttcggcgtccgggatgttccactcttctgcggtcttgcgatgtttgttgtagctggcagtgacaaacggtgccagcacttcatcgatacggttaatggtggtgccgccataaatatggctggcaacctgagcaataatctgcgcagttaccgcggttgccgtagagatgctcttcggcggttcaatctcggcgttccccattttaaagccctgggtcagcatgcctttcaggtcgatcaacatgcagttgaacatcgggaagaacggactgtaatcgagatcgtgatagtgaatatcgccacgctcatgtgcctgcaccacgtcacgcggcagcaggtgctgacgtgcatagtgtttagccacgatcccggccagcaggtcgcgctgggttggaatcaccttgctgtctttgttggcgttttcgttgagtaagctggcgttggtctgctcgaccagaccacggatctcctggttcaggcgaccgcgtttttcacgttcaatgtcgcgatcgtgacggtactcgatgtaagcacgagccagttgtttgtatggaccactcatcagctgattttcaactgcggtctggatctcattgatatccacctggttgcggccctgcatctgctcgctgacaaccgcggcaacagtggcgcaataatcggcatcatcgacttccgctgctttagctgcacgcagaatcgcttctttgatgcgctcacttttaaacggcactttgcagccgtctcgtttcatcacatgcggtgtcatgatcgctccatatttttaagaacaggttatccacagaaattgggaaaggcgttttccggttttttcgtttcgttttccggtgctttccgcaatcgccatccgcttatccacaacgccgcacctttttcgtggggagctgtagtagcaattatagtcgattaatacaacatattgggttgggacgcattttaaagtctatatatagtgctttgcatcaaggatgtttgagctttttttgatgtagctcaaagtaaaaagcagagcgtacggatgacgggcgctacagcgatatgtaaattttttaatgaatttgctggttgaaaaatcaacaaaaacaacatactgacagacaaaaccccggaatgaccggcattaccggggcttagggaagatttacttctgtaaccaccagacagcctcaaaaggccgtaaattcatggcacagggttgtggactggcttcttcgtagttatgcatcacaagctgccagttgccgcgcatttgccctgcctgccagggttggatctcacggctaaggttggcaatgaccagcaaggtttgccccttccattcacggcgatagcaccacaatacagggctgtttggcagcagatcctggtaattgccccatgtcaggatggcttcctgcttacgcagtgcgattaacttttggtaggtgtaaaacacgctggaatcatcggccagcgcggcttctacgttgatttgttgatagttatcgcccaggccaatccacggttcgccagccgtaaacccggcattatcgccgttgctccattgcatgggcgtgcgactgttgtcacgggatttactggcgaggattgccaataactcgtcggcatcacgcccatcgttgcgcagctcggcaaacatattgaggctctctacgtcgcgatagtcagtaatgcgcgtgaaatgcgggttggtcatgccaatctcttcgccctggtagatatacggcgttccctgcatgccatgcagcaccatcgccagcatttttgccgcaggcacgcggtattcaccttcatcaccaaagcgagaaacaatgcgcggctgatcgtggttacaccagaacaaggcattccatgctacgttgtgcattccttgttgccagtggcggaacaatgttttcaacgccacaaagtcaggtttagccagcgtccatttttcaccaccgggataatcgaccttcaggtgatgaaaattaaaggtcatgctcaattcactgcctgtcagagccgcgtatcgctggcaatgctcaaggctggtggaggacatttcacctacggtcattaacccgcgtggcgtaaacacatcgcggttcatctcgtgcaaaaactcgtgtgctcgtggcccgtcggtgtagaagcgacgcccgtcgccgtccaggtcttcagggaaacgcgggtctttggagatcagattcaccacatccaggcgcaacccgtcgaccccacgatcggcccagaactcacagacttttttcagctctgcgcgtaccgctggattctcccagttgagatccgcctgttctggtgcaaagagatgcaaatagtactgttcgctttccgcatgccagcgccacgcactaccgccaaatttactacgccagttgttcggtggcgtttctggttctccatcgcgccagatataaaactggcggtaagggctttctttgttcagcgcctcgcgaaaccaggcatgttgggtagaggtatggttaaacaccatatcgagaatgatacgaatcccgcggctttttgcctgcgtcaccagttcgtcaaaatcgtccagcgtgccgtaggtgggatcaatcgccgtatagttcgctacgtcgtaaccgttatcgacctggggagagacataaaagggggttagccagatggcatcaacgcccagtttatgcagatagtccaggtgttggataacgccacgtaaatcgccggtaccgctacccgtggtgtcctgaaaactctttggataaatctggtagataacgccgttttgccaccagtggggaagatgagtcattacgttattcctgcgaatgcgagggggcgcaattgcgccccgaagaaaattaaacaatgtccagcgtgcccaggcggtatttccgctgatagataaagctggtgagtacaatcgggatgatgatggcgatagccattgccagcgcaaacacctgccagtagctcggttgaatgctgagaattcccggcaggccgcctacgccgatgccattcgccataacgccgttcaggccgcatagcaatcctgccagaccagaaccaatcatcgcgcacagcatcgggaagcgatatttcaggttgatgccgtacattgcaggctcagtgaccccaagccaggcggagatagcggcaggcacggagatctcgcgttcattgtgcttgcggctggaaatgataatgcctatcacggcggagccctgagcgatattgctcagcgcaatcagcggccacactggcgtaccacccatgctttgaatcatctgcaaatcaatagcaagcgtggtctggtgtacaccggtgatcaccagcggggcgtacaggaagccaaacaatgctgcgccaatcggagcaaagctgccggtcatcaggtgacgtaccgcaaaggcaacgccatcgccaatcatgcgaccaaacggaccaatcagcgcatgggcgaggaacaccgcgaggatcaggctacagacgggtaccaccaccagatagaggtaatccggcacgatgcgtttaaggcgagtttcaataacgcccagcgccagtccggctaacagtgccgggatcacctgcgcctgatagcctactttggcgatgctgaacatgccaaagtcccacacttccggcagctgctgcccgagcagataagcgttcatcagctgtggagaaaccagtgtcacgccaagcacgataccaaggatcggcgtgccgcccatttttttcaccgcactccagcaaataccgaccggcaggtagaagaagatcgcttcaccgatcaaccacagaaaatcgtagatcgtttgcagggaagggtacatttgcgccagcgtctgaccgttgctcatgggcaaatcgccgatcacattgcgaaaaccgaggatcaaaccgccgctaatcaacgcgggcagcaacgggaagaagatcaccgcgaaatgagagatcaactgctcatgccatttcatattatgccgggcggctttttttacctgctctttatcaacctgcgcctgtccggtactcgcaatcagtgcttgatagtaatcacccacgttggtgccaatcaccacctgaaattgcccggcattggtgaaacagcctttcaccatagggagttgctcaatttctttcggtctggcattggccggttggttgaggacaaagcgtaggcgagtaatacagtggctcaccgtcgcaatattgccgcgcccgccgaccagttcaatcaaccgatcgatatccgtttggtttattttgctcatcataaagccccatggcagatgacatttttggttggctgcagaatatattgcgcggaaaaatttaaaaacgggaacgttcccgaaacgcagcgaagatcacaatttatcgttcaggaaacgatcaggacagggtggcggggatgatgatttgttgcggttcgctgcgcccggttacctgcgcgatcaactggcaagccgcctggcgtccagcttcggcgtaaccgggatctacggttacgatctccggatggaggaatttcattaacggcgtattaccgacgctcgccagttgcaaggtgtcgatgcgttgctcttgcaggtatttacttgcgccaagtgccagcgtgtcggttgcgcacagtaaggcggtagtttcaggcgtaatcacttttgcaacgttctcatagccttgcttcatagcaagccctggcagggcggcaacgggatgcagtttatgcgctttgcagaacgccaggtaggcttcgtgacgtcgcttaccggttgtcacgtcactgtgcggcacgccgagataactgatattacgatgcccctggtcatacagccgttgcatcaggattttgattgccccttcgtcgtcataacagacgctagcaaagccttttgcgtcacgcgccagcagaaccaggctactctgccagtgggctaacatttcttctgttatgccagtaaaaccgaacagcactacgccgtcgatattacgccgtttcagcactcccaaatgttcggcaactaattgcggggaaaactgactttccatcatgattgggtcgtaaccttgttcatagaacgctggcagcatggtttgaacggcgagattttcactcaagctatccagacgggtaacaatgatggcgaccactttatcgctttgcccacgcatagcgcgcgcagagcgggaaggggaaaatccatgctgattcatcactgcttcaacacgctcgcgggtgagctggctcacgccgctttcgttattcagcacccgggaaactgtagatttccccacgccgcttaagcgcgcgatatctttgatggtcagccgattttgcatcctgttgtcctgtaacgtgttgtttaattatttgagcctaacgttacccgtgcattcagcaatgggtaaagtctggtttatcgttggtttagttgtcagcaggtattatatcgccatagatgctacgaatattattggattctccttattatttgcggcgcttttttcacttaccggaggttatatggaacctgatcccacgcctctccctcgacggagattaaaacttttccggtaagcccgtcttttcacggcgttaccggatgcgtaaggccgtgacgttttaacgtccctgctcagctttattaccttcaggtaaggcttcgccacgcctgaagacatttctgtactgtttcagacagtgcggagggactccttatgtttaaagaaatttttacccggctcattcgccatttaccttcccgtctggttcatcgtgatccattgcctggcgcgcagcagacagtgaatacggtggtcccgccgtccttaagtgcgcattgcctgaaaatggcggtgatgcccgaagaagaattgtggaaaacgttcgacacccatccggaagggttaaatcaggcggaagtggaatctgcccgcgaacaacatggtgaaaataaattacccgcacaacaaccgagcccgtggtgggtacatttatgggtctgctatcgcaacccctttaatattttactcaccattctcggcgctatttcttacgccacggaagatttatttgctgcgggcgttatcgcgctaatggtcgctatttctacgttgctgaactttattcaggaagcacgttccactaaagcggcagatgccctgaaagcgatggtcagcaatactgcgacggtgctgcgcgtaattaacgacaaaggcgaaaatggctggctggagatcccgatcgaccagctggtgcccggcgatattataaaactggcggcgggagatatgatcccggcagatttacgtatcttgcaggcgcgggatctgttcgtcgctcaggcgagcttaaccggtgagtctctgcccgtagaaaaagccgctaccactcgccagccggagcacagcaatccgctggagtgcgacacgctgtgttttatgggcaccaccgtggtgagcggcacggcacaagcaatggtgattgctacaggtgccaatacctggtttggtcaactggcggggcgtgttagtgagcaggaaagcgagccgaatgcctttcagcaagggatcagccgcgtcagtatgctgctgattcgctttatgctggtgatggcaccggtggtgctgttaatcaatggttacaccaaaggcgactggtgggaagcggcgctgtttgcgcttagcgtcgcggtaggcctaacgccggaaatgttgccgatgattgttaccagcacgctggcgcgcggcgcagtaaagctgagcaaacagaaagtgatcgtcaaacatctggatgctattcagaactttggcgcaatggatattctgtgcactgataaaaccggcaccctgacgcaggataaaattgtgctggagaatcataccgatatctccggtaaaaccagcgaacgcgtgctgcatagcgcgtggttgaacagtcattatcagaccggacttaaaaacctgctcgatacagcggtgctcgaaggtacggatgaagagagtgcgcgcagcctggccagtcgttggcaaaaaattgatgagattccgtttgatttcgagcgtcgccggatgagcgtggtagtggcagaaaataccgagcaccatcagctggtttgcaaaggtgcattgcaggaaatcctcaatgtgtgtagccaggtgcgtcacaatggcgagattgtgccgctcgatgacatcatgctgcgtaagattaagcgggttactgatacgctgaatcgtcaggggctgcgcgtggttgcggtggcgacgaaatacctgccagcgcgtgaaggagattaccagcgggcggatgaatccgacctgatcctcgaaggatatattgcttttcttgatccgccaaaagagacaaccgctccggcactgaaggcattaaaagcgagtggaattaccgtaaaaatccttactggcgacagtgagttagttgcagcgaaagtgtgccatgaagtggggctggacgcgggagaggtggtcattggtagtgatattgaaacgctatctgacgacgaactggcaaatcttgcacagcgtaccacgctgtttgcccgcctgacgccgatgcataaagaacgcattgtgaccttactgaagcgcgaagggcatgtggttggctttatgggcgatggtattaatgatgcgcccgccttacgcgctgcggatatcggcatttctgtggacggcgcggtagatattgcccgtgaagcggctgatatcatcctgctggaaaaaagcctgatggtgctggaagagggggttattgagggacgtcgcactttcgccaacatgctgaaatacatcaaaatgacggcgagctctaacttcggtaatgtgttcagcgtgctggtagcgagtgctttcttgcccttcctgccgatgttgccgttacacttgcttattcagaacctgctgtacgatgtgagtcaggtggcgatcccgtttgataacgtcgacgacgagcaaattcaaaagccgcagcgttggaatccggcggatctggggcgctttatgatcttcttcggaccgatcagcagcatcttcgatattttgacgttttgcctgatgtggtgggtattccatgccaacacgccggaaacgcaaacgctgttccagagcggatggtttgtggtgggcttactgagccaaacgctgattgtgcatatgatccgcacccgccgtgtgccgtttattcagagctgtgcaagctggccgttaatgatcatgaccgtgatcgtgatgattgtcgggatcgcattgccgtttagtccgctggccagttatctgcaattacaggcgctgccgttaagctatttcccgtggctggttgcgattctggcagggtatatgacattaacccagttggtgaaagggttctatagccgtcgttacggctggcaataaagaataaactgggcacgatagccccgattcagattgtagacaaagtgagttttgttcatgccggatgcggcgtaaatgccttatccggccaacaaattcaataaattgcaggaatcacgtaggcctgataagcgtagcgcatcaggcgattttgcgtttgtcatcagacttaatccgggcatgatagcccggatttccatcaagattagcgacgaacagcgatcgcttcgatctcaatcttcacgtctttcggcagacgggcaacttcaacgcaagaacgtgccgggaaggtggcgttgtgttcggtgaagaaggcttcgtaagtggcgtttacggttgcgaagtcgttcagatcttttacaaacacggtagttttaacgatgtcgcccactttcaggccagcggcttcgacgatcgcttttacgttatccaggctctgacgtgcctgtgcagcgacgtctgccggtacttcgcccgttttcggatttaccgggatctgaccggaggtgatgatcatattgcccagatcaacgccctgtacgtaaggaccgatagctgccggtgcattttccgtcgcgatagttttgctcatgatttctcctttattacagcggtaaaaagtctggctcattatagggagccagacttttattaccaaccgcaattaattggccagcaccacattatgggaaaactctttttcacagtatttgcatttgagcgcgatatcattggcgcgttttcgcacggcaaagctggaactaaccggttcggcatggctgatacagttgctgttcgggcagaccagcacattgtcgatgcgctccggcagacttgggcggcttttacccaccacttcatagttgtcgatacggttaaccgtggcttgcggcgcatacaatgccagttgatctacttgatcttcactcaaaaaggtattttcgattttgatcagatctttgcggcccatctcgccagaaggcaggttcagaccaatggtgatgcgctgatccgtttcggtcagcttgaacagactcaacagcttaaaaccgatctgggcggggatatggtcaattaccgtgccgcgtttaatagcttcaacctgcaatttattatcgtgtgtcatctctatttccccttacagtaccagatcgcgattcagaaccagtgccagtaacgcctggcgagcgaaaatcccgttgcctgcctgctggaagtaccaggcgtgtggcgttttatcaacatccgtcgcaatctcatcaacacgcggcagcggatgcagcactttcatattggctttggcgttgtggagatcgctggcgcgaagaacaaactgcgctttcacgttggcgtactcggacgggtccagacgctctttttgcacgcgggtcatgtacaggatgtctacttccgccatcacttcttcaatagagctgtgcagactccatgcgatccctttttcatcgagcatatccagaatgtattgcggcattgccagcgcgtccggcgcgatgaagtaaaaacggttgccgtcgaacttcgctaacgcctgagtcagggagtgaacggtgcggccatatttcaggtcaccaaccattgcgacgtggagattgtccagacgcccctgggtttcctgaatagtgaataagtccagcaaggtttgcgtcggatgttggttggagccatcaccggcattcagtaccggtacattgccggaaaactcggtggccaggcgcgccgcaccttcctgcggatgacgcatcactatcgcatcgacgtaagtgctgataacgctaatggtatcggccagcgtttcgccctttttacccagacttgtattggcgctgtcggagaagcccaccacgctggcccccaggcggtgcatagatgtttcgaaagagaggcgggtacgggtagaggcttcgaagaaacagctggcaatgactttgtgcttcaacagctctggttgcgggtttgctttcagtttcgccgctgtcgccagcaccagattaaggtcatcgcgactaaggtcgtttatggaaatgatatgtttctgatatagcggattagccatcttttatctcctgacgcctgggcaaaaaaaagcccctcgattgaggggctgggaatgggtgatcaacgggaagaaaaacggcaggccagcgtcttttttcagacgcggtaagacaaaatgtcgaacacactgaaccatacatcctcccggcaaattgtccggcattatactcatcgtcagaagcggcgcaagcatttgatgcaatattttgtcagcgcaaacggtttatttgaattaaaagtcaaggtatatgcatttttatttgatgtgattctgcaggggaactgtccttcggtatcaataattgcagacattccctgctttttcctttttcactttcacgcaatcagatatgcattttattccattcatccgacttatagggcggagtgtgaaagcgaacggctaacactattgcttactgctcagggatgcgcgctatcactttaatttcaaaatcaaagcctgccagccatgtaacacccaccgccgtccagtttggataaggtggggcgctaaatatttcatttttcaccgtcatgatgtcttcaaattggttttctggatcggtatggaagctcgtaacatcaatgatatcgtcaaaagtgcatcccgcagctgccagggtcgcatgcaaattatcaaatgccagtctgacttgttgctgaaaatcgggttctggtgttccgtcctctcgacttcctacttgcccggaaacaaacagcaaatcgccggaacgaatagccgcagaataacgatgctcagcatatagactatgtcggccagcagggaaaacagcggttctttctaccatttggttatcctcaagatttacgacatgaacagaagatttctctttaccgggagccgcttttagcggacgacgtgagtaaacaaaacccagacatcatggataatggctgggcttaattgagcgtagtcggttatgcgccaaacgcgccatcaatggtatgcatcgcgccggtaacaaaactggcttctggccctgctaaccatgcgaccataccagcgacctcttccggttgcccatgtcttttgatagccatcaaactatgcaacatatcgcgcattggcccgttggcgggattagcgtcggtatcaattggccctggctggacgacgttaatggtgatcccacgcggtccaaaatcacgggccagcccgcgcgccatgccttgcagggcagatttgctggcggcataagcagccatgcctgcaacaggcatacgatcgccattcacggagccgatgattaagatgcgcccgccttcgggcatctgccgggcggcttcaacagaggcatgataaggagcatgaatattgattttgaaaaggcgatcaatatcgtcggcatttaattccagggcctcgccaaagacgccaatacctgcatttaccaccaggatatccaatgcgccgctcttacgaacgacatcaatgacagcgtctctgtcagcactatctgtgaatactgctgtcgctccagtctcttgtgccaggcgtttagcggcatctttgctccccgcataggtgaatcgtacattggccccatcggtgacgaaacgacgtacgatagcggcaccgataccacgactgccaccgaggatgagaactgtcttacctgtaaaagcgcccataaggactccttgatttattatgtaacatgcattacaaaactgttttaactttctgtcaacaggttttgtaatggtcactaaaaaacaatctcgcgttccaggtcgtcccagacgtttcgctcctgagcaggcaatctctgcggcaaaagtgctttttcaccaaaaaggtttcgatgctgtcagtgttgctgaagttactgattatcttggtattaaccccccgagcctctacgcggcttttggcagtaaagctgggttatttagccgtgtactcaatgaatacgtcggtacggaagctattccgcttgccgatattcttcgtgatgatcgtccggtaggcgagtgcctggttgaggtattaaaagaagcggcgcgcagatatagccaaaacggcggctgcgctggctgtatggttcttgaaggtattcatagtcatgatccacaagcgcgtgatattgccgttcaatattatcacgccgcagaaacgaccatttatgactacatcgccaggcggcatccacaacgcgcacaatgtgtgactgattttatgagtaccgtgatgtctgggctttctgcgaaggcacgagaggggcactctatagaacaactctgtgcaacagctgcaatggcgggggaagcgataaaaactattcttgaggagtgatgcgggccttgacccgaaaggcgggaaagcgcctgccgataagttgtgataagacaataattcacgcgttaaggctagcggaattgattatcttttcgtataacgatagaaatgaaacgttgttttaattaaggagtggaaaagatgatcatcggaaatattcataatcttcagccgtggctaccccaggagttacgccaggcgattgagcatatcaaagcacacgttacggcagaaacgccaaagggcaagcacgatatcgaaggcaatcgactgttttatcttatcagcgaagatatgaccgagccgtacgaagctcgccgtgcggagtaccatgcccgctatcttgacattcagattgtgttaaaaggtcaggaaggcatgaccttcagcacgcaacctgcaggcgcgccggataccgactggttagctgataaagacatcgcatttttgccggaaggcgttgatgagaaaacagttattctaaatgaaggtgattttgttgtgttttatccgggggaagtgcataaaccgctgtgcgcagtgggcgcgccagcccaggttcgcaaagcagtagtgaagatgctgatggcgtgatgacttttcgccgtaaataactcaaggtttacggcgagtttgtgaaaagagcgttttttgatatttttttgtgagtaaaatttgtaatgcttagacgttcttattcactcaaggagttcgtcatgagcaaaataagtgatttaaattattctcaacacattacattagccgacaattttaaacaaaaaagtgaagttttaaatacctggcgtgttggaatgaatgattttgcccgtattgccggggggcaggataacagaaggaatattctttctcctggagcatttttagagtttttggcaaagatatttaccctgggttatgtggattttagcaaacgctccaacgaagcgggtagaaatatgatggctcatattaagtccagttcttattctaaagatactaatggcaatgaaaaaatgaagttttacatgaataatcctgtaggggaacgagcggatagtcccaaggtgattatagaaattagtctttccactatcactactatggggactcgtcaaggacatacagccattatatttccacaacctgatggtagcactaaccgttatgaagggaagtcctttgaaagaaaagatgagagtagtttacacctgattactaacaaggttctggcgtgttaccaaagtgaagctaacaagaaaatagcgcgtctattaaataataatcaggagttaaataatctacagaaattaaataatctacagaagttaaataatctactgaagttaaataatatacaggggttaaataatcctcaggagttaaataatccgcagaatttaaatgattctcaggagttaaataacagccaggaattaaatagtccacaggagttaaatgatccgcaggagttaaataattctcaggacttaaataactctaaggtgagttgtacagttagtgttgattctacgattacgggtttattaaaagaaccattgaataatgcattattagcaataaggaacgaacatctgctattaatgcctcatgtatgtgatgaaagcattagttacttactgggcgaaaaaggtatacttgaagaaatagataagctctacgcattaaatgatcacggaattgataatgacaaagtaggtaacaatgaaattaatgacatcaaagttaacctgtctcatattcttattgattccttagatgatgcaaaggttaaccttacaccggtcatcgatagcattctggagacttttagtaaatccccatatattaatgatgtaagaatactggattggtgttttaataaaagcatgcaatattttgatgatactaaaaagataaagcatgcatgctccgtaataaatcatattaatcttcgcagcgatcagtctaaaatagctgagacattatttttcaatctcgataaagaaccctataaaaatagccctgaattacaggggttgatttggaataagttggttgtatatgtcaatgaatttaacttaagtaatcgagaaaaaacaaatttaatacaaaggctatttgataatgttgagtctatatttaatgaagtacctgtcagcattttagtgaatgatatttttatgaatgatttctttatgaaaaatcctgagatgattaattggtacttccctcagttacttaagagttatgagggtgaaaagatttattttgataatttaaaatatgatttaaatgataatgataaggaatctaataaagaaattttgaagaatcaaccagataatgttatcaaagaaaaactgaataatgaatacaaacttagatttagaatgatgcaaactatcttgcaaagcagagttaatgtattaccatatattaatgaacagcgtttaaataaactaaatccaccggaaaatttacgtatagcaatagaacactttgggtggaagaatagacctatcactgcataaaataatgtgatgccgggatggtttgtatttcccggcatctttatagcgatagcaattatttactgagcgtcgcgaccatcaccgctttgatagtatgcatacggttttccgcctgatcaaaaacaatgctggcggcagattcgaagacctcatcagtgacttccataccgccatgtaggccaaattcttccgccattttcttgccaagcgtcgtttggtcgtcatgaaacgcgggcaggcagtggaggaatttgacctccgggttaccggtcaactgcatcatcttgctgttcacctgatattcacgcagcaatgcaatccgttccgcccatttctcttttgcttcccccatgctcacccacacatcggtatagataaagtcagcaccttcaactcccttcgcgacatcttcagtcagcgtaatattcccaccattttgctgtgccagggcgcggcattccgtaaccagcgcagcttccggccagcacgcttgtggcgcgaccagacgcaaatccagaccggtaagcgccgcagcttcgagcatgctattgcccatgttgttacgcgcgtcacctgcatagaccagcgtcatttcgttgaacgctttgccgggcaaatgctcctgcatggtgagaagatccgccagcagctgcgtgggatggaactcattggtcaggccattccataccggcacgctagcgtattccgccagtgtttcgacaatctcctgaccatagccgcgatactgaataccgtcatacatgcgaccaagcacgcgggcagtgtctttaatgctctctttatgaccaatctggctgccgcttgggccgagataagtaacgcgagcaccctggtcatatgcggcaacttcgaaagagcatcgggtacgagtgctgtctttttcgaagatgagcgcgatgtttttaccagtgagtttggcttcttctttaccgcttttcttatcggctttcagcttcgcggctaactgcagcaggctgttgagttcagctggcgtgaaatcgagtaatttcaggaaatgcttatgataaaacccggacatagatccctcctgtggctaacgcctcaatgaattaaaattcaatttatatggatgattattcatttgcaagtctaaagcataaatctttgtcacaaaggtggaggcaatgtcagtggtgtgtgacaataagagtatcggcaggacattaagaggaatgagccatggcaaacccggaacaactggaagaacagcgtgaagaaacacgtttgattattgaagaattactggaagatggcagcgatccggacgcgctgtacaccatcgaacaccatctttccgcagacgatctggaaaccctggaaaaagcagcagttgaagcgtttaaactcggttacgaagtgaccgatccagaagagctggaagttgaagatggtgatatcgtgatttgctgcgacatcctcagcgagtgcgcgttgaatgccgatctgatcgatgcccaggttgaacaactgatgacgctggcagagaaatttgacgttgagtacgacggatggggcacttactttgaagatcctaacggcgaagatggcgacgatgaagattttgtcgatgaagacgatgacggagttcgccactaattaagcgtagcgcatcaggcccaggtagttcctgcaacctggtgaatttgtagcccggataaggcattcatgtcacatccggcataaacaaaacgtacgttgttaatgttcgaatgcccgcgagttgaacacgcgggcatttttttagagttcgcgcaacatccgcacttcacaatcgacatggcccgtgcagccaagcgcatagtcgatatgctcaaagcccaaatgctcataaagcgcaatggcttcctttaaaaaagcggtcgtttccagatagcagcgtttgaaacccatctctcgcgcctgctccatcgccattaaggccagtttttttgccagccctttgccgcggatagccggaagaaaatacatcttttgcagttcgcaaatatcgctctcactcccggttaatggcgctatcccaccgccgccgaccacttcaccctcgtactcaacgacccaatatgcatggccaggctgactatatacttgatacagctcgtcaagattcggatcggcgacggtgtagcctttatcagcggtaagaccgtattcggcggatacctgacgaatgacgcgggcgatagcaggattatcctgcagcgtcaggcgacgcattacaggactttgcggcgcaatgttattcatagtttaacccaataaaaataaagtaattatacatttgtttaataccactctcttcttacgtacgcaagcgacttataaagtaataaagtttttgccagcctattactgataagagtattgtaacgtggcagaacattttactgtctgtatatataagttatatcaatggattttttaattcagggaatttttatggctcaagttattaatgaaatggatgttccgtcccatagctttgtttttcatggtacaggtgagagatattttcttatttgtgtggtgaatgtgttgttaacgattataacgctaggtatctatttaccatgggcattaatgaaatgtaagcgttatctttatgctaatatggaagttaacggacaacgattttcttatggaattaccggtgggaatgtttttgttagttgtcttttttttgtttttttctatttcgcaatcttaatgacagtgagtgcagatatgccgcttgttggttgtgttttgactttgttactgttggttttgcttatatttatggcagcaaaaggactgcgtcatcaggccttaatgaccagtctcaacggcgtaagatttagttttaattgctctatgaaagggttctggtgggtgacctttttcttgccgattttaatggccattgggatggggactgttttctttatcagcacaaagatgctacctgccaatagtagtagtagtgttattatatccatggttctgatggcaatagttggtattgtttccattggtatttttaatggtactttatatagtctggtaatgagttttctctggagtaataccagtttcggtatacatcgtttcaaggtgaaattagatactacgtattgtataaaatatgccattctcgcatttttagctttattgccttttctcgctgttgctggttatattatcttcgatcaaatattaaatgcgtatgatagttctgtatatgcaaatgatgacattgagaatttacagcaatttatggaaatgcaacgtaaaatgataatcgcgcagttaatctattattttgggattgctgttagcacaagttatttaacggtgtctttgcgaaaccattttatgagcaacctgagtctgaatgatgggcgtattcgttttcgcttaactttaacgtaccacggtatgctttatcgcatgtgtgcgttggtggtgatatccgggattacgggcggtctggcttatccactgctgaaaatatggatgattgactggcaggcaaaaaatacgtatttgctgggcgatttggatgaccttcctttaatcaataaagaagaacaaccagataaaggcttcttagccagtattagtcggggagttatgccttctttaccatttctgtaagagataaaaaaggccggagcatgctccggccttcgttttcatcactgtgttttgattacagcgcggcgataacagcctgctgttcaatcagtttcgctttcgcttccgcatagccttccagcttctcacgctctttcgcgatgaccgcttccggtgcgcgggcgacaaagccttcgttcgccagtttgttctcgatacggctgatttcaccttcaatcttcgccacttctttcgccagacgcgccagctcatcttctttgttgatgaggccagccatcgggatcagcagctctgcaccgtcgatgatcttcgtaacggaaaccggacctttgtcatcggcaggcagcacggtgatactttccagacgcgccagggtttgcaggaagccacggttttcatttacgcgacgttctgcatccgcgctgcaaccacgcagcagcagctccagcggtttgcccggcgcgatgttcatttctgcacggatgttacgtaccgcaacgatcgcctgtttcagccattcggtgtcggccagtgcggcttcatcaacctgagatgcatcgtactgcgggaacggctgcagcatgatggtgtcggcagtgataccgcaaagtactttcacacgctgccagatggtttcggtgatgaacggaatgatcggatgcgcgaggcgcagcagaccttccagtacagtcaccagcgtatggcgagtaccgcgcagttctgcttcggtgccaccgttcattaccggcttggtcagctcgagataccagtcacagaactggttccaggtgaactcatacagaatgcctgcggcgatatcgaagcggaagctgtccagcgcttcgcggtacgctttgatggtctggttgaactccgccagaatccagcggtccgccaggctcagcgtcatttcgccgccgttgaagccgcaatcctgaccttctgtgttcatcagcacaaagcggctggcgttccacagcttgttacagaagttacggtaaccttccagacgcttcatatcccagttgatgtcacgaccggtagacgccagcgccgccagggtgaagcgcagcgcgtcagtaccgtgcggctcaataccgttcgggaactgcttctcggtgcgcttacggattttgtccgccagctgcggctgcatcatattgccggtacgtttttccagcagttctggcaggctaataccgtcaaccatatccagtgggtcgataacgttacccttggatttggacatcttctggccttcgtcatcacgaatcaggccggtcatgtaaacggtgtggaacggcacctgcggtttgccattttcatctttgatgaagtgcatggtcatcatgatcatgcgggcaatccagaagaaaatgatgtcgaaaccagataccatcacgctggttgggtggaactgacgcagggcgtcggtattttccggccagccaagggtagagaaggtccacagcgcagaagagaaccaggtatcgagaacgtcttcgtcctgacgcaggacaacatcagcaccgaggttattttctttacgcacttcgtcttcgttgcggccaacataaacgttacccgcttcgtcataccatgccgggatacggtgaccccaccacaactgacgagagatacaccagtcctgaatatcgcgcatccaggagaagtacatgttttcgtactgcttcggtacgaactgaatgtcgccgttctcaaccgcttcaaccgccggtttcgccaggacatcggcacgcacgtaccactggtcggtcagcattggttcgataactacgccgccacggtcgccgtaaggaacggtcaggtcgtgcggtttaatttcttccagcaggccaagcgcgtcaactgcggcaacgactgctttacgtgcagcaaaacgctccagtttctggaactctgcagggatttcgctggaataaacgtcagattcgttacctttggtatcgaacacctgggcgctttcacggatatcgccgtcaaaggtcaggatgttgatcatcggcagggcgtgacgtttacccacttcatagtcgttaaagtcgtgcgccggagtgattttcacgcagccggtgcctttttccatgtcggcgtgttcgtcgccaacgatcggaatacgacggttaaccagcggcagaatgacatatttgccaatcagatctttgtaacgcggatcttccgggttaacggctacgccagtatcgcccagcagggtttctggacgggtagtcgcgaccaccagataatctttaccgtctgcggttttcgcaccgtcagccagcggatagcggatgtgccacatgctacctttgctttcgcggttttcgacttccaggtcagagatagcggtgcgcagtttcggatcccagtttaccaggcgtttgccacggtaaatcaggtcttctttatacagacgaacgaaaacttctttcaccgcattggacaggccttcgtccatggtgaagcgttcacgctcccagtcgacggagttgccgagacggcgcatctgacgggtaatggtgccgccagattccgctttccattcccagattttgtcgatgaaagcttcgcggccgtagtcgtgacgggttttaccttcttctgcggcaatcttgcgctcaacgaccatctgggtagcgatcccggcgtggtcagtaccgacctgccacagggtgtttttgccctgcatgcgctgatagcggatcatggtatccatgatggtttgctggaaggcgtgacccatatgcaaactgccggtgacgttcggcggcgggatcatgatgcagaaactttcctggctttcatcgccattaggcttaaagtagccctgcttttcccagtgctcgtaaagcggctgttcgatatcttgtgggttatatgtcttttccattatttccaggttgccgtattcaggttgaaaccagccacgcggtaggctttatagcgttcgcgcgccagttgtttcagagaatcttcataaggaacgaagtctaccacttctgtgaaagcggtggcaaaatctgcaaagcttgttcgcagactaatcaatatatcgcgccggctgctgctacgcttttgcggccaggcgatctccaccggtgcaccgccgcgcggtccttctcccgctaaattatgcggaacaaagctttctgccggacgcgcccacagggcttcatccagccggtaagcctgcttttcatcttcacaggcgatgagcacgcgcttaccgctgcgccaacgttctgcggcaatttcacacaccagttgctcaacggcgcttaagccatcgacggtggtgtcattgtccagaaggtagaacgtcgcgtttttcataaatggggcttcttgtggtggatttaaatacgcatcaggtatacaccgcagcgcctgatgcgacgctgttgtgtcttatcaggcctacgagttcagtgctgtgtaggtcggataaggcgttcacgccgcatccggcaataacagccttgcctgacgcaattactcttcgccgttaaacccagcgcggtttaacaggaactgtgccagcaacgctaccggacgaccggtggcgccttttgctttaccagaacgccaggcggtaccggcgatatccaggtgcgcccagttgtacttacgggtaaagcgactcaggaagcaacctgcggtaatcgccccaccaggacgaccgccaatgttcgccatatcggcaaaattggactccagttgttcctgatactcgtcacccagcggtaagcgccatgcgcggtcaccggattgttcagacgcggcaatcagttcatgggccagcggattatggttcgccatcagaccagtaatatgatgacccagcgcgatcacgcaggcaccggtcagcgtcgccacgtcaatcaccgcttccggctcaaaacgctcaacgtaagttaacacgtcgcacagtaccaggcggccttcagcgtcggtgttcagcacttcaacggtttgaccggacatggtggttaacacatcgcccggacgataggctcgtccgccaggcatgttttcgcagcctgccaacacgccgataacgttaatcggcagttgtagctccgcgaccatccgcatcacgccgtaaaccgctgccgcaccgcacatatcgtacttcatctcatccatgccttcactaggcttgatgctgataccgccggagtcgaaggttaaacctttacccaccagcacgattgggcgtgcatcttcgctcgcgttgcctttgtactcaatcacgctcatcaggctttcgttttggctaccctgaccgaccgccagataggaatgcatccccagctctttcatctgctgttcgccgataacgcgggtgatgacattcttgctgtagctgtcagccagctggcgcgcttgactagcgaggtaagcggcgttacagatattcggcggcatattgccgagatcttttgctgctttaatcccggcggcaatcgccagaccgtgctggatcgcgcgctcaccgctggtcagttcacggcgggtcggcacgttgaacaccatcttacgcagcggacgacgcggttcgctcttgttcgttttcagctgatcgaaactgtagagcgtctcttttgccgtctcgacagcctgacgcactttccagtagttgttacggcctttaacgtgcagctcagtcagaaagcagaccgcttccatactgccagtatcattcagcgtattaatggttttctgaataacctgcttgtactgacgctcatccagctcacgttctttgccgcaaccaataaggagaattcgctcggaaagtacattcggaacatggtgcagcaacaatgtctgccccggttttccttccagttcgccccgacgtagcagggcgctgatgtacccatcgctgattttatcgagctgttctgcaatcggagaaaggcgacgtggttcgaagacgcccacgacgatgcaggaactccgctgtttctccgggctaccgctttttacactaaactccatgcactacgctcctgaatcttaaagacaacggcggtggctacagatagaattgcaagctttcgtaactcatgtccgctgttgcgatgacttcgtgttaatcttaacgttattacggcattggcacgtcagaacaaaatctgagaggtgaatccgttgagtataattatcttagcgacgatttcgacgactcaagagaataaatgacgtttaagccatgaaacaagctaaaatcctgcaaaagacgagtttttacgggcgtatttaaagtgataatcataagatatctggtgcgggagacgctcaaaagccagctggcgatactcttcatcttgcttttgatcttcttctgtcaaaagttagtgaggatcctcggcgcagcggttgacggcgatattccggcgaatctggtgctctcccttctcgggttgggcgtgccggaaatggcgcagcttatcctgccattaagcctgttcctcgggctgctgatgacgctgggcaaactgtataccgaaagtgaaattacggtaatgcatgcctgcggcctgagcaaagcggttctggtgaaagcggcaatgatccttgcggtattcacggcaatcgtagcggcggttaacgtgatgtgggcgggaccgtggagtagccgtcatcaggatgaagtgttagcagaagcgaaagcgaaccctggcatggcggcgctggcgcaagggcaattccagcaagcgactaatggcagcagcgtgctgttcatcgaaagcgttgacggcagcgatttcaaagatgtgttcctcgcgcaaattcgaccaaaaggtaatgcacgtccttctgtggtggtggccgattccggacatttaacccagctgcgcgacggctcccaggtcgtcactctcaaccagggaacgcgcttcgaaggcactgcattgttacgtgatttccgcattacggacttccaggattatcaggcgatcattggtcaccaggcggtggcgctcgacccgaacgataccgaccagatggacatgcgcacattgtggaacactgacaccgatcgtgctcgcgcagaactgaactggcgtatcacgttggtattcaccgtgtttatgatggcacttatggtcgtaccgctgagcgtggttaacccacgtcagggacgcgtactgagcatgctgccagccatgctgctgtatctacttttcttcctgatccagacctccctgaaaagcaacggcggtaaaggtaagctggacccgacgctgtggatgtggaccgttaacctgatttatctggctttagcgattgttctcaacctttgggacaccgtgccggtccgccgcctgcgcgccagttttagccgtaaaggagcggtgtgatgcaaccttttggcgtacttgaccgctatatcggtaaaactattttcaccaccatcatgatgacactgttcatgctggtgagcctgagcggcattatcaagtttgtcgatcagctgaaaaaagccgggcaggggagttacgacgcgttaggcgcaggaatgtataccttgctgagcgtgccgaaagatgtgcagatcttcttcccgatggcggctctgcttggggcgttgcttggtcttgggatgctggcgcagcgcagcgaactggtggtgatgcaggcttctggttttacccgtatgcaggtggcgctgagcgtgatgaaaaccgccattccgctggtcttgctgacgatggcgattggcgaatgggtcgcgccgcagggcgagcagatggcgcgtaactaccgtgcgcaggcgatgtacggcggcagcttgctctctacccagcaaggcttatgggcgaaagatggcaacaacttcgtctacattgagcgggttaaaggtgacgaagagttaggtggcatcagcatttatgcctttaacgagaatcgtcgtctgcaatccgtacgctatgccgctactgcgaagtttgacccggaacataaagtctggcgtctgagccaggttgatgaatctgatctgaccaatccgaaacagattaccggtagccagacggtgagcggcacctggaaaaccaacctcacgccggacaaactgggcgtggtggcgctggacccggatgcactctctatcagcggtttgcacaactatgtgaagtatctgaagagcagcggtcaggatgccggacgttatcagctcaacatgtggagcaaaatcttccagccgctatctgtggcggtgatgatgctgatggcgctgagcttcatctttggcccactgcgtagcgtaccgatgggcgtgcgtgtggtcaccggtatcagtttcggttttgtcttctacgtactggaccagatcttcggcccgctgacgttggtttatggcatcccgccgatcatcggcgcactgttgccaagcgccagcttcttcttaatcagcctgtggctgttaatgagaaaaagctaaccgaatgaacgaataaagggagcgaaagctccctttattattgttagcaaagtgtgcttcgttcattcctgaaaaataattaaaattcaatatattgcagtggggtgggcatgataagacgcgccagcgtcgcatcaggcaaagacaaatctcgcctgacttaccttcttctcccccccagcaaactccccaacatcccgcgtacaatctgattcgtcacttggcgagcggcgcttttggccattgtttgcaccacaccatctttcttcccgccgcgtggtccggtagtgccgaacaaaatatccttcaatccaccaagaatgccgtcatccaccgctacctctttccctttcgcgggaggattattttgctgctcggtactggcctgaaagcctttttgcaacatctcataggcggattcccggtccacctcatcctcatatttgccatacaccggagagtgattaatcaagccattacgctcatcttccgtcaccggccccatccggctacaaggcgcgatcaccatcgcacgctccaccacagaagggcttcctttcgcatccagaaaagagatcaacgcctcgccggtgcccagttcctgaatcgccttttcggtatcaaacgccggattggcccgcatggtttgcgccgctgccttcactgctttctgatcttttggcgtaaaagcccgcaaagcatgttgaacgcgattaccgagctgcccgagcacattatccggaatatcagacgggttttggctaacgaaccagacgcccacgcctttactgcgaataagccttatcacctgctcaatcttatccagcagtacctgcggggcatcgttaaacagcagatgtgcctcgtcgaagaaaaacaccagttttggtttctccagatcgcccgcttccggcaattgttcatacaactcactaagcatccacagcaggctggcggcgtacagtttcggcatctgataaagtttctcggcgctgaggatattgataacgcctttaccgttggcatcggtgcgcatccagtctttgatatccagcatcggctcaccaaagaagtgtgctgcgccttgctgttccaggctcaacagcccgcgctggatggcaccaacgcttgcgctactgatattaccgtactgattctggaaggatttggcgttatcgccgatgtactgggtaattgcccgcagatctttaaagtcgagcagtaacagcccctgatcgtcagcaatgcggaagatgatattcagcacgccagattgcacatcgttgagattcaacagtcgtgccagcaacagcggccccagatcgctaaccgtcgcccgcaccggatggcctttctcgccaaagatatcccacaccaccaccggattggcatgcggttgccagtcattgacgccgatatttttaagccttgcgagcagtttttcgctcaccgttcctgcctgcgcgacgccggtcagatcgcctttcacatcagccataaacaccggcacgccgatttcgctcaaactctccgccagtttttgcagcgtaacggttttacccgtccccgttgcgccggtaatcagcccatgacggttagccattcccggcagtaaaaacagttctgtgtccggcgtgcgggcaattaacaggggttcactcatgagatatcctccagtttcctgcctggagtataggcaacgtccggcaaagagaatacgtgtaatgaagagaaaataacttaaagcgtgttgccgtgataaatctgatacccgaggtcaacagtgttgtggttgtgatcgttatttttaattttgctcagcaacatttgggcggccatccgaccaatatcaaaacggggagtaattacgctggcgaggcttgggatcatttgcctgccaatctccagcccatgaaaacccgcaatggaaatttgttctggcacggcgaggtttcgctcgcggcacagcagaagcgcacccatcgcaatatcgtcattggtgcaaaatacaccgtctaaatccgggtttgcgctaagggcatcacgcattaactgcattcctaaatgaatggaactgatggcgcgtggattcatgcgtaatggggaaagattatgcagcatcatcgcatcgcaatacccctgataacgctgttcatcgcgggtgtcatctttggaaccgagatacagaattttgtgcctgactcgcttctccagcatggtacacaccatgtcaaaagcggcctgccgattatcaaaaccgacctccatatccagccgttctccctgtacatccatcaattccacgaccggaatggtggcactacgcagaaatttcaccgtcctgatggtgtgatatttttcgctaagtataatcccgtcaatgttataagagagcaggttaatcacgctctcttcttcggaatcgcgatcgtaattgtaattagcaataagggtctgataattatgctcagaggtgacggattctattcccgcgagaatgtcagcgaagagttgattttgaaaactcggaatcaagataccgagggtataactttgtgcattcaacaacatgccgggagcgcgattagggatataattgatctcttccataattttggcgatgcgctcgcctgtttcctttgccacctttttcgggctgcggatataacgactcacggtcatttttgttacgccagccagcgtagcgatatcctgtaaagaaattctgtgattgcgcataacttctcccaacgtcgggggaatcttcaatcttcccccgaaactacatcacaatattttattctttcagtgcaatacggcgttaatggctaacacgcccagcaaacccataatagaaataagggtttccatcaccgtccaggtacgcaacgtttcaccaaccgtcagattaaaataccctttaaatagccagaagccagggtcgtttacgtgactcgcgatcacgctgcccgcaccggttgccagtaccattaaagcgggatcggcatgggtaacgttgataatcggcaacaccacacccgcggtggtaatggccgcgacggtggcagagcccagagcgatacgcaacagcgccgcaacagtccagcacatcaataacgggctaagtgtagttccggtcattaagtgactaatatagtgcccgacaccgctatctactaatacctgcttaaacgcgccgccgccagcgataataaacacaatcatcgcgatagcgcctatagaatccccaatgatatccatgatttgctcgatggtgcgtccattacgtcggcccagtgtgaaaatcgcaataacaatggcaataaacagcgcaacggcagggttaccgacaaattcaaagaagaggcgcacggtgttagttttcggtaacgtaatttcacaaacggcggcgatagccatcaggatgaccgggatcacggcagcgaaaatactgttccagaaggagggcatctcctcttcgctaaacagatgaggattaaataagccttccggtggtgctttctcaaagcgagttagcagtttagaaaacagcggtcctgcgacaataactgtcggaatggtaatgataaatccatacagtaaagtcgttccgagattagcctcaaagatagtcgcgatggcagtaggccctggatgtggcggcagaaaacagtgggttacagagagcgctgctaccattggtacgccaacatacaacaggggtaatccactacttgctacgatggtaaataccaacggcaacagcaggacaaaacccacttcaaaaaacatggcgaggcccacaaccagaccggtgatcactagcgcccattgcacgcgttttttaccaaaagtagcaatcagcgtagtggcgatacgttgtgccgcacccgtatcagaaatcagcttgcctaacatggccccgaaaccgaggatcattgccagcccgccgagcgtgctgccgataccattttgtatagagtgcaggacggcctgtgcatccatcccttcggcaaatccgacgacggcagctaccagaacgagggcaataaagccgttaactttaaagccgatcatcaggataagaagcagcgcgacgcctgccgcaataatgattaatggcatagtctttatctcttattagtgccagaaaagcagcgctttcgcgctgcacgtaggggggctgttaaacagccactaacatgccgccatcaacaaacaacaggtggccgtttacgaaatcagaggctttactagaaaggaacaccgcagcaccaatcagttcctgcggatctccccagcgtgcggcgggggtccgtttgcacaaccaggcggtgaaggcttcgtcctcaaccagtgctttagtcatttctgttttgaaatagcccggcgcaataccgttgacctgaatattgtggcgcgccagctcgacgcacatgccgcgggtgagcatttttaccgcccctttgcttgcggcataaggggtgatggtgtcacgtcccagttcgctttgcatgctgcaaatattaataactttacctgccttgcgttcaaccatgtgacgagttaccgcttggcttaccaggaacacggcggtctggtttactgcgatcacatcattccactcttgttcagggaactcagtaaaaggatgacggcgctggataccggcgttattcaccagcacatcaatggggccgatgtccttttcgatatgttcaacggcggcatcaatttcatgtttatgagtaacattaaaaggtgcggcaacggcctgaataccctcctggtggagtttttctacagcaagttctgcgcgttcggcagtaatatcattaataattatttgtgcgccatatttacccaggccggttgccagtaaaaagccaatgccctgtgcactaccggtaatcaagatattttttcctgccagactaaatagatcgttcattgtattattcctttatttatctcttagaaaacaagctggacttttgctgcctgggttttatcaccggcgaaacgtagcgcctcttccaggtcagtgaagggatattcagcactcagtaaaggcagtggattgataacgccattcgccagccaactcactgcggtattaaattcgctggtaaaacggaaagagcctctgagactaatctccttaccaatcaacgtcatcattgggaattctgccatcgcgcctcccatacctacctgcaccattacgccgcgtgcacgagtgacctccagacaggtattcacactactaggatgaccggacacttcaaagctgacatcgaaatagcctttttccgctttccagtgatccatgtcgtcgttttgtgggtttacgagcacatccgcccccatctctttgcccaggctaagggaacggggactcacatcagcacagacaatttccgcggcccccagtgttttcactgcactgacaatcaggcagccaatgggtccaacaccggaaataaatactcgcttgccctgtaactcgccggcctgatgtgcggcatgaatcgcgacggctaaaggttcggcaaaagccataaccttttcgtcagctttggccggataagggacacattggctcgtttcgaccattttataacgggtaaaaccaccatcaacatgagggaaatacatggcactgccaaaaaaacgcatatctgtacactgattctcgttatgttcaatgcagtatttgcagtgaccgcacggtttagacggattaatggctaccgtttgcccttcatgtaattcactactgtcgctatgaataactttaccgataacttcatgacctaacaccatcggtgcctttatcatgaaattacctacttttccttcctgataataatgtaaatcggaaccgcaaattccacctcgggttatttgtactaatgttccattattattccaatctatcgtctgctcggtaacggcaacagttttcttgcccgcaacaacgcaggactgtgttttcacttgcataaattcctcactggtcaggtagacacctcggaagcatttaagcggttttaactgtcattatttgtgatgaagatcacgtcagaaaattgttacattactatgttacgcataacgtgatgtgccttgtaattcttatcagtagaaataaaaaaacgtgaaattattatgccgccaggcgtagtatcgcagcaggtaagatgattcaggagattttaaatggcgggtgaaagctttattttgatgggcgttagtgggagtggtaaaacattaattggtagcaaggttgccgcgttattatctgctaaatttattgatggtgacgatcttcatccagccaaaaatatagataaaatgagccagggtattccattatctgatgaagatcgacttccctggctggaacgcttaaatgatgctagttacagtctttataaaaagaatgaaacaggatttattgtctgtagtagtttaaaaaaacagtatcgtgatattttacgcaagggtagcccccatgttcatttcctctggttagatggcgactatgaaactattctcgcgcgaatgcagcgtcgggctgggcattttatgccggtagcgttactaaaaagtcagtttgaggcactggagcgtccacaagcagatgaacaggatattgtgcgcattgatatcaaccatgatattgccaatgtcaccgaacaatgtcggcaggctgtgctggcgatacgacaaaacagaatatgtgcgaaagagggcagcgccagtgatcagcgctgcgaatgattttcaaaaatcggctttcaacaccacgcggtaacgcgccttaccgtcgcgcacatgctggatggcgtcgttaattttgctcatcgggaacagttcggtggtcggcgcaaccttgctgcgggcggcaaaacgcatcagcttacgcagctcataaggcgtgccggtagcagaaccagagacgctgcgatcgcccgcaattaacgtaaaggccggaacagacagcggcgtgagaaccgcaccgaccgtatggaaattaccgccataggtcagcgcctcaaaatagggctgccagtcgaggctgacgttgacggtgttgataatgagatcaaactgccccgccagtgctttcagtgcctgcggatcgcggctattcaccactttatcggcacccatcgccagcacttcctgctctttcgccggattagaactaaaggctgtcacctcgcatcccattgcgtgcagaagttttatagcgatatgccccagcccgccaataccaattaccccaacgcggctggtagcagtgatatggtgcatcaacagtggtttaaagaccgtgataccgccgcacaacagcggcccggcggactcgatatcaatattttctggcagtggaatcacccattgccagtccgcacgcaacttctcggcaaagccaccgcgattcataatcgtcggcaccgcaccttgctcgcagttgatctgattaccgctaatacaggcgtcgcagtgaccacagctacgcgccgtccagccaatcccgacacgctgaccgacctgcaaacctttatcctgcgcggcgctcccgagtgccaccacgcgcccaatcacctcatgcccggcaaccagcggatattgactaaatccccattcgttatcgatcatgctcagatcggaatggcagatcccgcagtaatccacctgcacttcaacatcttgtggcctcagctcaccgggatcgtactcataaacttccagttcgccgcccgcttcttttgcggcatagctttttatcatgctcattttttggtccttctctggtgttgtttgggaagtgtagagcatggcagggcggggtgcctggagtgtgacaaaggttacacatcgctgtatgcaatgctgaaaatttcagcacttagcgaggtgcgagcaagctggcgcttgcatggtggcgtgcgacaggtataatccacaacgttttccgcatacctcttcagtgccgaagtggcgaaatcggtagacgcagttgattcaaaatcaaccgtagaaatacgtgccggttcgagtccggccttcggcaccaaaagtatgtaaatagacctcaactgaggtctttttttatgcctgaaatccagtgtttatctatctttcccgctatattaactctctcaaggtcaaccgatatcaacgtacatctaccaacatatgttggtacagatgatggtatttccggttcgataatgcttgtaccaacagggagggaatacgagaaatcacaggacattgctaatgctggtacgcaatattacctgaagctaaaaacctgcacgttagccctttgtaggccagataagacgcgtcagcgtcgcatctggcataaacaaagcgcactttgctggtctgttcccctcaccctaaccctctccccggaggggcgaggggactgtccgggcacatttttagactttgtcatcagtctgagcctgccattggcaggctctggtgtccttttacgctaccatgctaataatcagcacaataatcagcccaaccacggagttgaccagctccagcagaccccaggttttcaacgtgtcttttacactcaggtcaaagtaacctttgaacaaccagaaagatgcatcgttaatgtgggtgagggtgttggaacccgcagccgtcgccagtaccagcagcgccggattcacgccaaccagctgaccagttgctggatctaggattgcagcactgataatcccggcggcggtcatcgcgctaacgacaccctgacccgtcgccagacgaattagcacagtgatcagccatgccatgatgtaggggctgatattgccgtgggacatcaacatgccgatggtgtcgccaatgccggtgtcgatgatggtctgcttcagcacgccacccgcaccgatgatcagaatcaccattgcaatactcttcaccgcgctttcaaaagcgttcatcacccactgcatgtcatgaccacgtgcggtgccaaagagtacgaatgcaaccaccatcgcaataaacattgcaatcgggctggaaccgataaagttaaccacttcccaggcaggggtatcttttaccagccagatattggcgatggtggtagagatcataatgatcgccgggatcagcggcaccagaatgctaacgccgaaagagggcagattattcatatctaccggttgatctgctttcaggaaacttggcgttgggcgctcaagattgccgaggaacttcggcaggatcagacctgcgcagattacacttgggatcgtcaccagtacgccatagatataaaccatccccatatccgcgccataagcattcaccagcgccaccggacccggctgcggtgggaacagactatgtgcggtagtggcagctgctactgccgggatcgccagtttcaggaacggaattttagcttcggcggcaataacaataaccagcggcgctaacatgataaaggccacttcatagaacatcgccagaccaaaaatcaggccgatgataatcacgctcagctgtacatagcgcagaccgagacgcgccagcagcgtatgcgctatctggtgagccgcgccggagtcgaccatcaatttaccgatgaccgcaccgaacaccacgatgatagccagttcccccagcgtgttgccgaagcccgctttcatagtgtgcagcaggctcatcaaatccatgcccgccagcatcccgacggacagcgccgccaccaacaaagccaccatactattgattttgaacttcaaattcagtaccagcatcagaccaatgccgaataccacccagagaatgttaagcacatgcataacgttttaccttacctggttgaaccgttgttattttgggcgatatgttatgtaaattggtcaaccattgttgcgatgaatgtcacatcctctgatcaataaccatcgattaccctttgctgcaatttgcagcaacaaccatgagagtgaaattcttgtgatgtggttaaccaatttcagaattcgggttgacatgtcttaccaaaaggtagaacttatacgccatctcatccgatgcaacgccacggctgcggtctggttgttcatccggatacctaaacaactccagggttccgcgtctctttgctgtggaacccactatgtgaaagaggaaaaatcatggaacagacctggcgctggtacggcccaaacgatccggtttctttagctgatgtccgtcaggcgggcgcaactggcgtggttaccgcgctgcaccatatcccgaacggcgaagtatggtccgttgaagagatcctcaaacgcaaggcgatcattgaagacgcaggcctggtgtggtctgtcgtagaaagcgtgccaattcacgaagatatcaaaacccacactggcaactatgagcagtggatcgctaactatcagcagactctgcgcaacctggcgcagtgtggcattcgcaccgtgtgctacaacttcatgccggtgctcgactggacccgtactgacctcgaatacgtgctgccagacggctccaaagctctgcgcttcgaccagatcgaattcgctgcattcgaaatgcatatcctgaaacgcccaggcgcggaagcggattacaccgaagaagaaattgctcaggcagctgaacgcttcgccactatgagcgatgaagacaaagcgcgtctgacccgtaacatcattgctggtcttccgggcgcggaagaaggctacaccctcgaccagttccgtaaacacctggagctgtacaaagatatcgacaaagcgaagctgcgcgaaaactttgccgtcttcctgaaagcgattattccagttgctgaagaagtcggcgtgcgtatggctgttcacccggacgatccgccgcgcccgatcctcggcctgccgcgcattgtttccaccattgaagatatgcagtggatggttgataccgtaaacagcatggcaaacggttttaccatgtgcaccggttcctacggcgtgcgtgctgacaacgatctggttgatatgatcaagcagttcggtccgcgtatttacttcacccatctgcgctccaccatgcgtgaagataacccgaaaaccttccacgaagcggcgcacctgaacggtgacgttgatatgtacgaagtggtgaaagcgattgttgaagaagaacaccgtcgtaaagcggaaggcaaagaagacctgatcccgatgcgtccggaccacggtcatcagatgctggacgacctgaagaagaaaaccaacccaggttactccgcaattggtcgtctgaaaggcctggccgaagttcgcggtgtcgaactggcgatccagcgcgctttctttagccgttaatatccaccggcatggctgcgcgccgtgccggttccttcttccttgccgtcactctttgaagacggattctggagtttacgatgactactattgttgacagcaatctgccggttgcccgcccgagttgggatcattctcgtctggaaagtcgcattgtgcatctcggttgcggggcgtttcaccgcgcgcaccaggcgctgtatacccatcatctgctggaaagcaccgacagcgactggggcatctgcgaagttaacctgatgccaggcaacgaccgcgtgctgatcgaaaacctgaaaaaacagcaactgctgtacaccgtagcggaaaaaggcgcagagagcaccgagctgaaaattatcggtagcatgaaagaagcgctgcatccggaaatcgatggctgcgaaggtattctcaacgcgatggcgcgtccgcaaacggcgattgtctctctaacggtcacggaaaaaggctactgcgctgatgcggcaagcggtcaactggatctcaataacccgctgatcaagcacgatctggaaaacccgactgcgccgaagtccgcgattggttacatcgtcgaagcgttgcgtctgcgtcgtgaaaaagggttgaaagcgtttacggtgatgtcctgcgataacgtgcgtgaaaacggtcatgtggcgaaggtcgcggtactggggctggctcaggcgcgtgacccgcagctggcggcatggattgaagaaaatgtcaccttcccgtgcaccatggttgaccgcatcgttccggcggcgacgccagaaaccttacaggaaattgctgaccagctgggtgtttacgacccgtgcgccattgcctgcgaaccgttccgtcagtgggtgattgaagataacttcgttaatggtcgcccggattgggataaagtgggcgcacagttcgttgcagacgttgtgccgttcgaaatgatgaagctgcgtatgctgaacggcagccactcttttctggcgtacctcggttacctcggcggctatgaaaccattgccgacaccgtgactaacccggcttatcgcaaagcggcctttgccctgatgatgcaggaacaagcgccaacgctgagcatgccggaaggtacagacctgaacgcctatgcgacgctgctgatcgagcgtttcagcaacccgtctctgcgtcaccgtacctggcagattgcgatggacggcagccagaagttaccgcagcgtctgctggacccggtgcgtctgcacctgcaaaacggcggcagctggcgtcacctggcgctgggcgtggctggctggatgcgttacacccagggcgtggatgagcagggtaatgccattgacgtggtcgacccgatgctggcggagttccagaagatcaacgcgcagtatcagggcgcagaccgcgtgaaagcgctgctgggcctgagcggtatttttgccgatgatctgccgcagaatgccgactttgttggcgcagtgacggcggcatatcagcagctgtgcgaacgcggtgcgcgcgagtgtgtggctgcgctgtaactaactgattaccctacagacttactggtcaatcaaactgatatttggttgaccagttttcgtttttttgcccacctgtacgtgccaacttccagtgctaatggtatagtttgagattaacgggggccgtaaaattgcccgttgtaggccggataaggcgttcacgccgcatccggcaaaaatttgattaaccgcacctaacggacacaacaccatgaaatctgccacctctgcgcaaagaccttaccaggaagtcggggcgatgatccgcgatctgatcataaagacgccgtacaatcctggcgaacggctgccgccggagcgtgaaattgcagaaatgcttgatgtcacgcggacggtggtacgtgaagcgctgatcatgctggagatcaaagggctggtggaagtacgccggggtgccggtatctatgttcttgataacagtggcagccagaacacagacagtccggatgccaacgtctgcaacgatgccggtccttttgagctgttacaggcgcggcagttattggagagcaacatcgccgagtttgccgctttgcaggctacccgcgaagatatcgtcaaaatgcgtcaggcattgcaactggaagagcgtgaactggcttccagtgcgccgggcagcagcgaaagcggtgacatgcagttccatctcgctattgccgaagcaacgcataacagcatgctggtggagctgttccgtcagtcctggcagtggcgggaaaacaatccaatgtggatccagttgcacagccatctggatgacagcctgtatcgcaaagagtggttgggcgatcacaaacagatcctcgccgcgttaatcaaaaaagatgcccgagcggcgaagctggcaatgtggcagcatctggaaaacgttaagcaacgtctgctggaattcagcaacgttgacgatatttattttgatggctatctgtttgatagttggccgctggataaagtcgacgcctgacttattataataagcgcaagggtaaacgttccttgcgctttcttaaattaagaagtcgcaatgagtattactttgtaaattgcagggtattgtttagctatctgtataacctgaatgttagtactcattcttcctggtagtaaggcgagattattaaagttgccatgcagcgtccggggaagtgttgggcgctgttttttttgtttcttaataatgtgttgtaagccgtagaaggcgtgtaggtcgcaccctatgcgacctacacatcagtcaggaattacccttcacgttctaccactttaatttccaccatgccgatcccgagcttacgcgggctgtgtccgaggatattcccttcgttggtactgacaggttccggcggcacaattaccagtgtgtcggcatcggttgggttatcgaaatgcagtgtggtggtggtcacttcattgcccagcacaagagtttgttcttcattgcctacgcgtaccggaataggacggctggcgttattgccgtatgctttggcggtaatcaccaggtcaaatttcttcggcagcggatgcttgtactcgatttttacttcatcgcccagctgcgcgttggaccagcggccccagctctccggacgggaaatcccgctaaactgtttcacctcttctggcgcaccggcgacgttaaagatgaaactgtcggctttgtagcgaatatcgttatcaacaatcttcagcgtatcgacattgcctttgtaacgcgccatgtcgatgaccgtatctttaaatgccgttttgccctgccatgttgttttgtcaacatgctgaacaatttgctgaccgccaagctgcccttggctgacacaccagtcggtggaaagtgccagttccggagcccagagttgtgccatcttgtagcaacggtcaacccagacgaaattgtcgcgtggagcgaaatcggccagctggaaacgcagcggtgcactgtattcgctttccggcagcggttccacgcgtttgtcactaacccgcaacagcagcggcaaacggaaatggctaccgctgaaggcaatcatgtttttctgctggtcgatggtgaactctttcatctctttagggaatttccacaggcggatgatatctggcttccacgccaatgttttctctttgatattgaggaagatttcgctcatgctctgcccggataaactgctacgaccaagtccgagatagttatcgccaccgagaatgtccagcaccgtcgcgccgttatccatcgtgttacgcttcactgccagcgtctcttgctgcggcttgtcgccacgaatgacaaaaaacaggttattgcgatcctgcttattgaggtatttccacgccgtgttgttcatcgctaaatggtcagaagagacgacgatgacggtatctttaaaccacggactcgctttgattttgttgataaacgtcgcgatgttctcctggctgcaacttaccgcgctgaaactctgattcggtttaccgtcaaaatcatattttttgcggttacaggtacgagagataaaaccatccgggtgatgggtatcgactgtcagggtaaacagactgaatcgctgaccactgcgggaaagctcttcaaactttttccacgcttcatcgagaacggtatcgtcgtagaatccccagtcgttgcgatagtgcgggtcggctaccacgcttttcagctcttcactgccgtataagtggtcgaagccatggctcttcaggaacacatctttaccggcaaaacgcagattcgcgccctgcacgaaatagttctgataaccgctgtttttcaggatatctcccagacagatgttctgcgggaagaagctggagacagaggcggaggcgttgccttcaaagggggcaaacagcggtatgccgcactgagaagccaccatgcccgcaatcgtgtaatctgttcccggcagctgctgcgtgtggctgaaatccaggccttcatttttcaacgcgcccagttcaggcgtgagatccgggaaagcctcgttatcaaaataggtccgctcgagactttcgccgtagatataaaccaggttgagtttcgggtcagggatagttttgctcggctctttataataagccgcaaagtccgggtcgccgtcgcgactctgggatttcaccagttccgttatctgacgaaatgccgggctggcgtccacgctacccagcgccagtaagagcgccagcaggctgtaaccaaaatggtgcggatgatggcgacgacggcgcaggatccagcccagcgcaccgaacaccgctgtcagccccagcacaatgccgatacccggcaaaatgtatttgctgacgccagcaccggtcaggctgttggttaaggtatagagaaccgcgtcgttaataccatcgccagtaaaatagtcgctggcaaacagggtgatatttaaaacgacaaatagccccagcaccgttaacgtggctgcaaaccaccaggtgttacgtcccgctttccatgcgtaaatcagcacagaggcgagaaaaagggcgaaagagagtagttcactcaacgggcgatcctcactaaaccgggccgtttagccaacgtttaagctttttgagaagcacaatgtaatggcgtcgccatattgctgcaattctagtgtcaaaaaaatgcgatgttgttaggaattagtttataaacagacttttttgattacggtcacttcccgtgtaacaggggtaaaaccgtccaggagcagggaaaagggcaggagagagccgcgtcagccgggtaacagctaaaacgcggcgtttcgcggttcaggaaatgaagttcagcccctgttttaacaccagatcgcaggctttggttttcaccttttctgccagcggagttgttccgatgttatccagattgagttgctgaccatctttggttttcagcaaaccctgaatgccgtccagatagttggtgtcttctttttgctcttcactgttcaggcccagcttttccagcacctggttcttgatgttttcggcatcggttacgctcgccagcttttgcttcgcgcagtattgcagaatgcctgcggcattgttcatgttatctgcgcttaaggcctggtttccgctgctaagcaagttagttaaactcgcgaggctccaaccgccttcctgtgtcgtgctgttttggttgccaagttcgctggcggcgctggagagcgcatctttccaggacgcagcatgcaccccggtggaaattaatgcgctggcggcaatggcacagcacagaagatgtttaacagttttcatcatcattactcaaggtggaattgtgtcgcagtataccgccagaaacggggattaatactctttacctgttacccggctacggtagctatcccagttgaagatcacccacaaactgttacccaggcgcatacggtccatcacgcgttcgcccagcaacttggtcatctcttccatattactgttggtcagcatcccggttgggcgtttggaagaagagcggcgatcgacgatctggttgatgatcactttttcgtatttgctttcggtctgcacgccgatctcatcgatcaccagcagatcaacgttgctcagatcgttaagcagttgttcttcgctggtaccgctattcctgaaggtatctttcatcgcgctcataatatcggccacggtgatgatcaatacggatttaccgcgtagcagcagctcgttgcagattgccgccgccagatggtttttgccggttcctggcttaccagaaaagatgaagctggcgatgttgccgtcaaactcttcgacatactggcgcgctttgcttaacgcattcatctgcccttcacactcaacgcgatagttctcaaaggaacagttctgatgcagtggacgaataccggagcggttaaaggtgcgctgcattttcatcgcccgattttcacgttcgagagcggcggagcggatcgctccttgttctttttgccaggccagtagttcttcacccgttttgaatgcgggtttgatatgggcaggcatcattttttgcaggcgttgcatcaggtcgccaacgtttttcatcgttaccctctgaatcctggtggaatttggctgtcaggttcgctgaccgtattcacatctcgtttcggcagtccgccgttgctggcacgaccgatttgcaggctgcgcgccagtttttgttgccactgcacatggtgaaagactttaccttccgcctgccagtaggcaatgaaactggccagttcttcggtggtcaccggctctcttagcgccacgccccatagcgccgccaggcggataaaatcggcatcgggttgccagtccggatacatggcgaatttccccatgggtacagcaacgggagcggcttgcggttcctgatagagttgatcgtccagagcgacatcgcttcccggacgcgccagcttttcttccagcgccagcagttcagccaggcgtgcaggcgtgacggcataaaacgccggggcattgttagcaaatacggcaaccacaccgccttcagcttttgccagaacggtttggtgatcgtgtaccagggcgtcaataccaacgacgtccggggtcaaaactctggaagacatactgtttctcaaatatggaacgatgaacgagaagggagataacttttatagtaacacacggaggagaggaggctgtctctcatccgtgtgcttaagcgaggcaattttatacgcgagggcgcttgcggtacaaccataatccaggaatggaaagaccgatggataacgcaccaacaatgctactagctgtaagaaagttggttaacagggtaatcatcaacggttcgctgtaacctaactggctgatttttaccgcgctaatcattgcggtataagcgcttatgcccgggaacatagggataacggccgccacggtaaacactttcggatgcgccagataccagcggctccattgaataccaatggtaccgaccagcatagaagccataaaggtactccactcaatattcaacccgctggtcatcaagatcattcgggaaccatgacctatcgagccaagcagcgcacaccagcgtaacgcccgcacgggaacgttgaacaccatcgcaaagccgaccgcaggaatggcggcgaggatcatatcctgcgccaacgctaacagaaattcgatcacacccatccgcgtagcccccaaatcgtcagtgccatcactacgccgacgcaggtagccagtgtcagcagactggcgatcgcccagcgtgccagtccggtattgatgtggcctttaaacatatcggcgacggcattaatcaacggaaagcccggcactagcagcagaacgctggcggccatcgcaatggtgggggtattgctgaaagtggggagttgcaaaagcaatccggaaatggtggtggcggcgaaagcggtaaggcaaaagttgatctgtggatgaagatgacgttgtgccagcagctggcggatatacatcgcggtcgtactggcaaagaaggtgatgacggcaccatcccagccaccgttattgagtttacagaaacaggcgcaagaaaggccaaccattaaggctaccagccatcttgggtaacgtaatggctgaatttggctaaatcgtttctctacgcctttgtaatccagcagatgatgctccgcaagaatcacaatgtgctggacttcagtcaccacatgcatattaatgccgcgatcgtgatttttacgtgtgcttgtcaggcattgcccatctttaatagttgtcagcactatggcgttgctagagatagaactttcgacgctgtccattcccagtgcccgacccagtcgactggaaagctcatcaaccaacgcgctttccgcaccatgttgcaaaagaaataatccacactggatacaaagccgtgttacggctcgctgttgctcagtttgcataactcgccctttgtcatagacgtgctgcgtattgttcagataatgagaatccatttgtatcatgaagcacggttgttttgcggtaggttaagatcaaaattgcgctgattaatcctggttatcgggagaagctcggtgataaaaagcgaattatctctcgccgcaaacaaactatcacatgaatattatcatcataatgaatttattgtttggcctttacgaatcaggataatagataaccgggcacgttttttaatgttaacaagctaaaaccatcagatttcattgaataaatattggttgtgtgattttgcattctgcgggaagggatatcatttaattataaattaaatgaatgtgatttctgtttttcattaagtattcctaacaacttaatgtagatattttaaatgtctccaggctatttcaccaggttatcatttgatgctaaccttctgacacatgcagtggagttgttgtgcagcaggagtatgctgatatgaaagtgaatgctaaggataatttattcgcttaatctattaatttgctggaaacatttaaggaatgaatatcctgaataaaccatcataatttttagacagtggatgtggaggaaatatgttgccaggatgctgcaaaaatggaattgttatcagtaaaatacctgttatgcaagcagggttaaaagaggtcatgaggactcacttccctgaatatgaaataatatccagcgcctctgcggaggaccttaccttattacaattacgtcgttccggattagtcattgctgatttagccggtgaaagtgaagatccacgttctgtttgtgaacattattattctttaatcagtcaatatcgggaaattcactgggttttcatggtgagtcgctcctggtattcccaggcagtagaactgctcatgtgccctacggcgacgttattgtctgatgttgaacccattgagaatctggtcaagaccgtacgttccggcaatacgcacgcagagcgtatcagcgccatgctgacctccccggcaatgactgaaactcatgattttagctatcgctccgtcattctcactcttagtgagcgcaaggtactgcggctattaggtaaaggatggggcatcaaccagatagctagtttgcttaagaaaagtaataaaactatcagcgcccaaaaaaacagtgcgatgcgtcgactggcaattcacagcaacgctgaaatgtatgcatggataaatagcgcgcagggtgcaagagaacttaacttgccttctgtttatggagatgccgcagaatggaacacagccgaattaagaagagaaatgagccacagttaaaaaaatgcgtcatgagtagtatcggtattgagagtttattcagaaagtttgcgggtaacccttataagctccatacctataccagtcaggagagttttcaggatgccatgagccggatcagctttgcggcggtcattttttctttttctgccatgagaagtgagcgcagagagggattatcttgcctgactgaactggcgattaagtttccgcgtacccggcgtttagttattgcggatgatgatattgaagctcggctgattggtagtttgagcccaagtccgctggacggtgtattaagtaaagcgagtacgctggagatttttcatcaggaactctttttgagtttaaatggtgtacgtcaggcgaccgaccgactgaacaatcagtggtacattaaccaaagccggacgttaagcccgacggagagagaaatattgcgctttatgagccgtggctacagtatgacacaaattgccgagcagcttaaacgcaatatcaaaacgatccgtgcacataaatttaatgtgatgagcaaactgggcgtcagttctgacgcagggttgttggaggccgcagatattctgttatgtatgcggcattgcgaaacaagtaatgtgttgcatccctattaatccgcatgatgccgggtttacttccccggcagtgctttcatttcagcgtacaatcgccacattgctgcacatccggtaagcgataacgctggcagcaagtgcggcgcaccagcaggccgtcgcgcagtaccacggtacgccagagtggattatcttcaccgttcgtgagcgttttctcaaaaaagagggcatggcgcaggctttcaacagtagcctcgccgagcagttgcttcatctcagtgagataccagttgatcaaataaccggtattactccagataagtttgccgttgatctctccggtcgcttctagtgcttgcacaaccggaaccagcgcctggctgattaacgtttccattcgatgctgcgggctatgtggtgttgcgtttttatcttcacacacatcgacccagaaacaggcgacgcgtccggtttcgtgaaactcagcatggaaatgttccgggctcacatctaatgccttttcctgcgtcagtagcgccagcattaatggtggcaccatcaggccgatataccattgtgcccatagactgatcagcggtttgttctcgcggatcatcatcggttggttgcgatagatatgatcggaatagaccgccagcagagaacttagcacattcggactactccattgcgccagcgtcatggcgttaagtggggcaggttcatccaggcggataaactccagcaaatgttcacgatgttttgcgatcgtcgcccgcacggcttgcgcaagcgtgggatcctgcggctggagatgcgttcgccagatgacatcttcatagagcggtgcggaacgataggccataatcgggatagtaatctaaatgataatgattgctaatcatagcgataggtttacccgatagcaagggatttatctggcttgcaaatgataaaaattatcatatgatattggttatcattatcaatgaaagagatgaaatcatgttgcaacgtacgctgggcagtggctggggagtgttgctgccgggattgctgattgcggggctgatgtatgcggatttaagcagtgatcagtggcggattgtcattctgatgggattagtattgacgccgatgatgctgtatcacaaacagttgcggcattacattttgctaccaagctgcctggcacttattgctggcatcatgctgatgataatgaatttgaatcagggatgaaaaatcaaggaagaaacaagaaaggaagtaaagataattggtgcgaggggggggacttgaacccccacgtccgtaaggacactaacacctgaagctagcgcgtctaccaattccgccaccttcgcacagtcatcttactttttttgatatcgcctcgtttggtgcgaggggggggacttgaacccccacgtccgtaagaacactaacacctgaagctagcgcgtctaccaattccgccaccttcgcccagtgcgagcaatatcaacgtggtttttggtgcgaggggggggacttgaacccccacgtccgtaaggacactaacacctgaagctagcgcgtctaccaattccgccaccttcgcataccatcaattcttaaaaagaattgctaccacggaggcgcattctagtggttttcagcttttcgtcaatagttaattatcgacagaggtgtaattgctggaaaaatgtccatcaggaaactagcgtgcaggtttggtatgcatgcgggggcagatgccagatgcgacgctggcgcgtcttatctggcctacgaagggctaacgtgcaggttttgtaggtcggataaggcgttcacgccgcatccgacacggtattcggcgagataattaacctttcttcgcctggcgggtcataatggcgcgatacaccttgaagcgccctgtttgcgcgatcacttcgtggaagccaaatgtctcatccagcacgtccggataaggcaggaaggcgttcgctacaattcgcagctcgccgccgctattaagatgacgcaccgcaccgcgaatcagcgtttgcgccgcatccaggctggtttgcatcccatcgtggaacggcgggttggagatgatcatatcaaaacgacctttcacctcggaaaagacgttgctggcaaagacttcaccttcaacaccgttggccgcaagtgttgcgcggctggcttctaccgccggggcagagacatcgcacaaggtgagacgaattttcgggctatggcgcgcaaaggcaacactaagcacgcccgcgccacagccgacatccagcactttacctttcgtgtgcggagttaacgtgctgagcagcaactggctaccgacatccagaccgtcgcggctaaacacgccaggcagcgttttgaccgtcaggccatcgacgctgtattcgccccagaatttctccgcatcaaataccggctgtttttccagacgaccaaaatagaggccacagcgacgagcgctgtcgactttattcaacggcgcataatctgccagcatctgctcggcgctgcgcacgccgctgcggttctcgccaacgacaaaaatatctgtccccactggcagcagagaaagtaaattcatcaactggaactgggcttccggtttgttcttcggccagtagtaaatcagcgtatcgcaatctgcgacgtcatccgccgtggcgaccagactgaaacgggcgttatcccccatctggcggcttaatacctgccagtggtggaattgctgggtatgagcacggctggccgcggtatctaaacgcgcgggcaggtcatcctgtaagtctccggcaaacagaatacggctttgttcgaaatcatcactgtgacgcagcaagacttcacttgccggggtaaatgcagacatggaatgctcctcaattgatactggcggcgattatagccatatgttggcgcggtatcgacgaatttgctatatttgcgcccctgacaacaggagcgattcgctatgacatcccgacgagactggcagttacagcaactgggcattacccagtggagcctgcgtcgccctggcgcgttgcagggggagattgccattgcgatcccggcacacgtccgtctggtgatggtggcaaacgatcttcccgccctgactgatcctttagtgagcgatgttctgcgcgcattaaccgtcagccccgaccaggtgctgcaactgacgccagaaaaaatcgcgatgctgccgcaaggcagtcactgcaacagttggcggttgggtactgacgaaccgctaagtctggaaggcgctcaggtggcaagtccggcgctcaccgatttacgggcaaacccaacggcacgcgccgcgttatggcaacaaatttgcacatatgaacacgatttcttccctcgaaacgactgatttaccggcggcttaccacattgaacaacgcgcccacgcctttccgtggagtgaaaaaacgtttgccagcaaccagggcgagcgttatctcaactttcagttaacgcaaaacggcaaaatggcggcgtttgcgattacgcaagtggtgctggatgaagctacattgttcaatattgcggtcgatcctgactatcagcgtcagggattgggaagggcgctgctggaacatctgatcgacgaactggaaaaacgcggcgtggcgacactatggctggaagtccgtgctagtaacgctgccgccattgccctgtacgaaagtttaggctttaacgaggcgacgattcgccgcaattactaccccaccacggacggtcgcgaagacgccatcatcatggcgttgccaatcagtatgtaatacaaggtggaataatgaagtgggactggattttctttgatgccgatgaaacgctgtttacctttgacagtttcaccggcctgcagcggatgtttcttgattacagcgtcacctttaccgctgaagattttcaggactatcaggccgttaacaagccactgtgggtggattatcaaaacggcgcgatcactagtttacagcttcagcacgggcggtttgagagctgggccgaacggctgaacgtcgagccaggtaaactcaacgaagcctttattaatgcgatggcggaaatctgcacgccgctgccgggcgcggtttctctgcttaacgccattcgtggcaacgccaaaatcggcatcatcaccaacggctttagtgccttgcaacaggtgcgtctggaacgcacgggcctgcgtgattacttcgatttgctggtgatttccgaagaagttggcgttgccaaaccgaataagaaaattttcgattatgcgctggaacaggcgggcaatcctgaccgtagtcgcgtgctgatggttggcgacactgccgagtccgatattctcggtggcatcaacgccgggcttgcgacctgctggctgaatgcacaccatcgcgagcaaccagaaggcatcgcgcccacctggaccgtttctagcttgcacgaactggagcagctcctgtgtaaacactgattgcctcccccccgttgatgggtaaaatagccgcaatttttcgttttcaacaagcgcggcgcgatgccgcttactcaagaagaaagaattatgacgttgtctccttatttgcaagaggtggcgaagcgccgcacttttgccattatttctcacccggacgccggtaagactaccatcaccgagaaggtgctgctgttcggacaggccattcagaccgccggtacagtaaaaggccgtggttccaaccagcacgctaagagcgactggatggagatggaaaagcagcgtgggatctccattactacgtctgtgatgcagtttccgtatcacgattgcctggttaacctgctcgacaccccggggcacgaagacttcagcgaagatacctatcgtaccctgacggcggtggactgctgcctgatggttatcgacgccgcaaaaggtgttgaagatcgtacccgtaagctgatggaagttacccgtctgcgcgacacgccgatcctcacctttatgaacaaacttgaccgtgatatccgcgacccgatggagctgctcgatgaagttgagaacgagctgaaaatcggctgtgcgccgatcacctggccgattggctgcggcaagctgtttaaaggcgtttaccacctttataaagacgaaacctatctctatcagagcggtaaaggccacaccattcaggaagtccgcattgttaaagggctgaataacccggatctcgatgctgcggttggtgaagatctggcacagcagctgcgtgacgaactggaactggtgaaaggcgcgtctaacgagttcgacaaagagctgttccttgcgggcgaaatcactccggtattcttcggtactgcgctgggtaacttcggcgtcgatcatatgttggatggcctggtggagtgggcacctgcgccgatgccgcgtcagactgatacccgtaccgtagaagcgagcgaagataaatttaccggcttcgtatttaaaattcaggccaacatggacccgaaacaccgcgaccgcgtggcgtttatgcgtgtggtgtccggtaaatatgaaaaaggcatgaaactgcgccaggtgcgcactgcgaaagatgtggtgatctccgacgcgctgacctttatggcgggtgaccgtagccacgttgaagaagcgtatccgggcgatatcctcggcctgcacaaccacggcaccattcagatcggcgacacctttacccagggtgagatgatgaagttcaccggtattccgaacttcgcaccagaactgttccgtcgtatccgcctgaaagatccgctgaagcaaaaacagctgctcaaagggctggtacagctttccgaagagggcgcggtgcaggtgttccgtccaatctccaacaacgatctgatcgttggtgcagttggtgtgctgcagtttgatgtggtggtagcgcgcctgaagagcgaatacaacgttgaagcagtgtatgagagtgtcaacgttgccactgcccgctgggtagaatgtgcagacgcgaagaaattcgaagagttcaagcgtaagaacgaaagccaactggcgcttgatggcggcgataacctcgcttacatcgctaccagcatggtcaacctgcgcctggcacaggaacgttatccggacgttcagttccaccagacccgcgagcattaattcttgcctccagggcgcggtagccgctgcgccctgtcaatttcccttccttattagccgcttacggaatgttcttaaaacattcacttttgcttatgttttcgctgatatcccgagcggtttcaaaattgtgatctatatttaacaaagtgatgacatttctgacggcgttaaataccgttcaatgcgtagatatcagtatctaaagccgtcgattgtcattctaccgatattaataactgattcagaggctgtaatggtcgttattcatcactcatcgcttttgtgatggcgaccattgacttctgtagagggtgaagtctctccctattcagcaatgcaacctcgtgttgccaggctcaaattacgagcaaacatacaggaataaatcgatgactatgacaagactgaagattagcaaaactctgctggctgtaatgttgacctctgccgtcgcgaccggctctgcctacgcggaaaacaacgcgcagactaccaatgaaagcgcagggcaaaaagtcgatagctctatgaataaagtcggtaatttcatggatgacagcgccatcaccgcgaaagtgaaggcggccctggtggatcatgacaacatcaagagcaccgatatctctgtaaaaaccgatcaaaaagtcgtgaccctgagcggtttcgttgaaagccaggcccaggccgaagaggcagtgaaagtggcgaaaggcgttgaaggggtgacctctgtcagcgacaaactgcacgttcgcgacgctaaagaaggcagcgtgaagggctacgcgggtgacaccgccaccaccagtgaaatcaaagccaaactgctggcggacgatatcgtcccttcccgtcatgtgaaagttgaaaccaccgacggcgtggttcagctctccggtaccgtcgattctcaggcacaaagtgaccgtgctgaaagtatcgccaaagcggtagatggtgtgaaaagcgttaaaaatgatctgaaaactaagtaattcgtcgtaattcgtcctcccgaactttgtcgggaggcgcgatgtgcaccacactaaaaatatcgcattgagtgattttcacgctcatatcaagcggtgacattaactatggtaaaggagacgcttatgtttcgttggggcatcatatttctggttatcgcgttaatcgccgccgcacttgggtttggtggtctggccggtaccgctgcaggcgcagctaaaattgtctttgtcgtcgggattattctgttcctggtgagtttgttcatgggccgaaaacgaccctaaatttcagaccattaagaaaattttatccaaagccagtccagcggactggcttttgcggttttagcgaataataaattgcgttactttgtcattctttcacaacaaaaacaggaaggcagaggtggggcagcgaatacctgtaacgcttggtaatattgcgccgttgagcctaaggccgttccagcctggacgaatagctctggtgtgcgaaggcggcggacagcgtggaattttcacggctggcgtgctggatgagtttatgcgcgcgcagtttaatcctttcgatctttatctcggcacatctgccggggcgcagaacctcagcgcgtttatctgcaatcagcccggttacgcgcgcaaagtcatcatgcgctataccacaaaacgcgaatttttcgatccattgcgctttgtccgtggaggaaatcttatcgatctcgactggctggtggaggccactgcaagccagatgccgttgcaaatggataccgccgcgcggttgtttgacagcggcaaaagcttttatatgtgcgcctgtcgtcaggatgactacgcgccgaattactttttaccaaccaaacaaaactggctggatgtgattcgcgcctccagtgcgatacctggcttttatcgtagcggagtgagcctggaaggcattaactacctggatggcgggatcagtgatgcgattccggttaaagaggcggcaaggcagggcgctaaaacgttggtcgtcattcgcactgtgccgagtcaaatgtactacacgccgcagtggttcaaacgcatggaacgctggctgggtgacagtagcctgcagccgctggtcaatctggtgcagcatcatgaaaccagctatcgtgacattcagcaatttattgagaaaccaccgggcaagctgcggatattcgaaatttatccgccgaagccattacatagtatcgcgcttggcagtcggattccggcgctgcgtgaagactataaacttgggcgtttatgcggtcgttatttcctcgccacggttggcaagctattaactgaaaaagcgccgcttacccgccatctggtgccagtggtgacgccggaaagcattgtcattccgcctgcgccagtcgccaacgatacgctggttgccgaagtgagcgacgctccgcaggcgaacgacccgacatttaacaatgaggatctggcttgatttgccgttttatcgacacccactgccattttgatttcccgccgtttagtggcgatgaagaggccagcctgcaacgcgcggcacaagcgggcgtaggcaagatcattgttccggcaacagaggcggaaaattttgcccgtgtgttggcattagcggaaaattatcaaccgctgtatgccgcattgggcttgcatcctggtatgttggaaaaacatagcgatgtgtctcttgagcagctacagcaggcgctggaaaggcgtccggcgaaggtggtggcggtgggggagatcggtctggatctctttggcgacgatccgcaatttgagaggcagcagtggttactcgacgaacaactgaaactggcgaaacgctacgatctgccggtgatcctgcatagtcggcgcacgcacgacaaactggcgatgcatcttaaacgccacgatttaccgcgcactggcgtggttcacggtttttccggcagcctgcaacaggccgaacggtttgtacagctgggctacaaaattggcgtaggcggtactatcacctatccacgcgccagtaaaacccgcgatgtcatcgcaaaattaccgctggcaagcttattgctggaaaccgacgcgccggatatgccgctcaacggttttcaggggcagcctaaccgcccggagcaggctgcccgtgtgttcgccgtgctttgcgagttgcgccgggaaccggcggatgagattgcgcaagcgttgcttaataacacgtatacgttgtttaacgtgccgtaagccggataaggcgttcacgccgcatccggcagttggcgcacaatgcctgatgcgacgcttaacgcgtcttatcatgcctacaggtttgtgccgaaccgtaggccggataaggcgttcacgccgcatccggcagttggcgcacaatgcctgatgcgacgcttgtcgcgtcttatcatgcctacaagtctgtgccgaaccgtaggccggataaggcgttcacgccgcatccggcagtcggcgcataatgcctgatgcgacgcttgtcgcgtcttatcatgcctacaggtttgtgccgaaccgtaggccggataaggcgttcgcgccgcatccggcagttggcgcacaatgcctgatgcgacgcttgacgcgtcttatcaggcctacaagtctgtgccgaaccgtaggccgtatccggcatgtcacaaatagagcgccggaaatatcaaccggctcaccccgcgcacctttaacgcatcagccaacggctcaacgtcttccggcgtggcgctcgcccagctttgcgcctcgccatacacgccgtgggcatgaaacgcgttcaggcgtaccggaacatcgccgagtcccttgataaacgccgccagttcttcgatgtgttgcaaataatccacctggccagggatcaccagcaaacgcagttccgccagcttgccgcgctctgccagcaaatagatgctgcgcttaatctgctgattatcgcgtccggtgagttgttgatgacattcgctcccccacgctttgagatcgagcattgcgccgtcgcacaccgggagcaatttttcccagccggtttcgctcaacatgccgttactgtccaccagacaggtgagatggcgcagttgcggatcgtttttgatagcagtaaacagcgccaccacaaacggcagctgggtcgtggcttcaccgccactcaccgttatcccttcgataaacagcactgctttgcggacatggctaagcacttcgtccacgctcatggattgcgccatgggcgtggcatgttgcggacacctcttcaggcaggtatcacactgctcgcaaaccacagcgttccacaccactttgccgtcaacaatctgcaacgcctgatgcggacactgtggcacgcactccccacagtcattgcaacgtcccatcgtccacggattgtgacagtttttgcagcgcagattgcagccctgcaaaaacagagccagacgactgcctggcccgtcaacgcaggagaaggggataatcttactgactaaagcgcatctgctgttcatggcttatcacgcgcggctggcgttccagaatacgagtgttgcgtgcggcttcttcgcccagccaggtggtgttggtgcgactaccttcggcgcgatatttttctaaatcgctcaaacgcaccatataaccggtaacgcgaaccagatcgttaccgctgacattggcggtaaattcacgcattccggctttaaaggcaccgaggcaaagctgtaccagtgcctgcgggttacgtttgatggtttcgtcgagcgtcagaatgtcgctgatgccggaataataataagcatgatgcggggcgacagtttgcagatgggtgatcggatctggctcatcgccatacggcaaacgcgcgcccggcgtggtgccgatatcggaactgatcccgctctgtgcgtgtaacatggcgcgtttttgccagccatatttcacgggggtattggcgacaaactccgccagttgcgcgctgatgcgataacctacttcatttgcggcggcttctttaccgtagcgcgcggcaatcccttctttttcacacagcaagttaaccgcttccgccagcccatacatgccaaacattggcacaaaacgttcagggttaatcagcccttctttcaccaggaagctattctcaaagaagtgactttgttgatagaggaattcacaccgcgcatcgatgatggcgatctgctgctggcagtagtgcggtagagtgcgcgtaaagaagtcatccaggctttcgctgcgctcggcaatggctttcaggttaaggcgtaccagcgtgctgccaccacccgccagcggcagactgttgtaacagctcacaatcccgtagcccccttttgtgaaaattttatcatgcaccggaccgttggcgatgtgcggtttgctacattcacagatgttcttcgccacttccagcagcaggtcatcaggggtgatttcaggatcgtagataaaggtcaggttcggactaacctgcttcaactctgcatctgcacgtaagatcgcgcgggtaatggggctatcagacgggccgatattggcgtgcataaaggcgtctggcagggttctgtcgaggtaacgccagaaacgttttattcgaacatcgatctcgtcttgtgttagaattctaacatacggttgcaacaacgcatccagttgccccaggtagaccggcatgcttgtgacgctcggtacgtggtggtaaagaatggtcagcagagagagtgcgtcatcaagatctttcgcgccttccagctccagccattcggaaccgttcgccagaaaacgggcgtaatcgggtaagacatagcgcggtttgtacggcgcatgaccttcaaacatatcgcagattacaccttcatccagcgcgcggcgggcttcggcaggaagctgtgggtaaggcagattgttttctgcttccagtgccagaaaatggcgcttctgctccgggctaagcactgggctggtgacaatttgctggcaacgttgttgcagtgcattttcatgagaagtgggcatcttcttttccttttatgccgaaggtgatgcgccattgtaagaagtttcgtgatgttcactttgatcctgatgcgtttgccaccactgacgcattcatttgaaagtgaattatttgaaccagatcgcattacagtgatgcaaacttgtaagtagatttccttaattgtgatgtgtatcgaagtgtgttgcggagtagatgttagaatactaacaaactcgcaaggtgaattttattggcgacaagccaggagaatgaaatgactgatctgaaagcaagcagcctgcgtgcactgaaattgatggacctgaccaccctgaatgacgacgacaccgacgagaaagtgatcgccctgtgtcatcaggccaaaactccggtcggcaataccgccgctatctgtatctatcctcgctttatcccgattgctcgcaaaactctgaaagagcagggcaccccggaaatccgtatcgctacggtaaccaacttcccacacggtaacgacgacatcgacatcgcgctggcagaaacccgtgcggcaatcgcctacggtgctgatgaagttgacgttgtgttcccgtaccgcgcgctgatggcgggtaacgagcaggttggttttgacctggtgaaagcctgtaaagaggcttgcgcggcagcgaatgtactgctgaaagtgatcatcgaaaccggcgaactgaaagacgaagcgctgatccgtaaagcgtctgaaatctccatcaaagcgggtgcggacttcatcaaaacctctaccggtaaagtggctgtgaacgcgacgccggaaagcgcgcgcatcatgatggaagtgatccgtgatatgggcgtagaaaaaaccgttggtttcaaaccggcgggcggcgtgcgtactgcggaagatgcgcagaaatatctcgccattgcagatgaactgttcggtgctgactgggcagatgcgcgtcactaccgctttggcgcttccagcctgctggcaagcctgctgaaagcgctgggtcacggcgacggtaagagcgccagcagctactaagtaagatgctttacgcctgatgcgctgcgcttatcaggcctacgagacgtatctacccgtaggccggataaggcgtagacgcatccggcaaaagccgcctcatactcttttcctcgggaggttaccttgtttctcgcacaagaaattattcgtaaaaaacgtgatggtcatgcgctgagcgatgaagaaattcgtttctttatcaacggtattcgcgacaacactatctccgaagggcagattgccgccctcgcgatgaccattttcttccacgatatgacaatgcctgagcgtgtcagcctgaccatggcgatgcgagatagtggaaccgttctcgactggaaaagcctgcatctgaatggcccgattgttgataaacactccaccggtggcgtcggcgatgtgactagcctgatgttggggccgatggtcgcagcctgcggcggctatattccgatgatctctggtcgcggcctcggtcatactggcggtacgctcgacaaactggaatccatccctggcttcgacattttcccggatgacaaccgtttccgcgaaattattaaagacgtcggcgtggcgattatcggtcagaccagtagtctggctccggctgataaacgtttctacgcgacccgtgatattaccgcaaccgtggactccatcccgctgatcaccgcctctattctggcgaagaaacttgcggaaggtctggacgcgctggtgatggacgtgaaagtgggtagcggcgcgtttatgccgacctacgaactctctgaagcccttgccgaagcgattgttggcgtggctaacggcgctggcgtgcgcaccaccgcgctgctcaccgacatgaatcaggtactggcctccagtgcaggtaacgcggttgaagttcgtgaagcggtgcagttcctgacgggtgaatatcgtaacccgcgtctgtttgatgtcacgatggcgctgtgcgtggagatgctgatctccggcaaactggcgaaagatgacgccgaagcgcgcgcgaaattgcaggcggtgctggacaacggtaaagcggcagaagtctttggtcgtatggtagcggcacaaaaaggcccgaccgacttcgttgagaactacgcgaagtatctgccgacagcgatgctgacgaaagcagtctatgctgataccgaaggttttgtcagtgaaatggatacccgcgcgctggggatggcagtggttgcaatgggcggcggacgccgtcaggcatctgacaccatcgattacagcgtcggctttactgatatggcgcgtctgggcgaccaggtagacggtcagcgtccgctggcggttatccacgcgaaagacgaaaacaactggcaggaagcggcgaaagcggtgaaagcggcaattaaacttgccgataaagcaccggaaagcacaccaactgtctatcgccgtatcagcgaataacggtatactgatctgatcatttaaatttgaagcactgagtacggagaacatatgaaacgtgcatttattatggtgctggacagtttcggcatcggcgctacagaagatgcagaacgctttggtgacgtcggggctgacaccctgggtcatatcgcagaagcttgtgccaaaggcgaagctgataacggtcgtaaaggcccgctcaatctgccaaatctgacccgtctggggctggcgaaagcacacgaaggttctaccggtttcattccggcgggaatggacggcaacgctgaagttatcggcgcgtacgcatgggcgcacgaaatgagttccggtaaagataccccgtctggtcactgggaaattgccggtgtcccggttctgtttgagtggggatatttctccgatcacgaaaacagcttcccgcaagagctgctggataaactggtcgaacgcgctaatctgccgggttacctcggtaactgccactcttccggtacggtcattctggatcaactgggcgaagagcacatgaaaaccggcaagccgattttctatacctccgctgactccgtgttccagattgcctgccatgaagaaactttcggtctggataaactctacgaactgtgcgaaatcgcccgtgaagagctgaccaacggcggctacaatatcggtcgtgttatcgctcgtccgtttatcggcgacaaagccggtaacttccagcgtaccggtaaccgtcacgacctggctgttgagccgccagcaccgaccgtgctgcagaaactggttgatgaaaaacacggccaggtggtttctgtcggtaaaattgcggacatctacgccaactgcggtatcaccaaaaaagtgaaagcgactggcctggacgcgctgtttgacgccaccatcaaagagatgaaagaagcgggtgataacaccatcgtcttcaccaacttcgttgacttcgactcttcctggggccaccgtcgcgacgtcgccggttatgccgcgggtctggaactgttcgaccgccgtctgccggagctgatgtctctgctgcgcgatgacgacatcctgatcctcaccgctgaccacggttgcgatccgacctggaccggtactgaccacacgcgtgaacacattccggtactggtatatggcccgaaagtaaaaccgggcagtctgggtcatcgtgaaaccttcgcggatatcggccagactctggcaaaatattttggtacttctgatatggaatatggcaaagccatgttctgatggatttgggcggagcgttgactccgcctttgttatgtcacaaaaaggataaaacaatggctaccccacacattaatgcagaaatgggcgatttcgctgacgtagttttgatgccaggcgacccgctgcgtgcgaagtatattgctgaaactttccttgaagatgcccgtgaagtgaacaacgttcgcggtatgctgggcttcaccggtacttacaaaggccgcaaaatttccgtaatgggtcacggtatgggtatcccgtcctgctccatctacaccaaagaactgatcaccgatttcggcgtgaagaaaattatccgcgtgggttcctgtggcgcagttctgccgcacgtaaaactgcgcgacgtcgttatcggtatgggtgcctgcaccgattccaaagttaaccgcatccgttttaaagaccatgactttgccgctatcgctgacttcgacatggtgcgtaacgcagtagatgcagctaaagcactgggtattgatgctcgcgtgggtaacctgttctccgctgacctgttctactctccggacggcgaaatgttcgacgtgatggaaaaatacggcattctcggcgtggaaatggaagcggctggtatctacggcgtcgctgcagaatttggcgcgaaagccctgaccatctgcaccgtatctgaccacatccgcactcacgagcagaccactgccgctgagcgtcagactaccttcaacgacatgatcaaaatcgcactggaatccgttctgctgggcgataaagagtaattgtgtttcgctgcaaggcgattgccttgtgaagccggagcgggagactgctccggctttttagtatctattcatttttctctccagcttgaatattttcgctatacttttcagtgaaatgtgttaataaatctattcaagtatctattcacgaatctattcattaatgagcgagctgactgatcttttactgcaagggccgcgttctgccccggaattgcgccagcgtctggcaatcagtcaggcgacgttcagtcgccttgttgccagagaagatcgggtgattcgctttggtaaagcacgggcaacgcgatatgcactgctgcgtccttatcgcggaattgagcgtattcccgtctggcgggtggacgataccggaaaggcgcataaattcgccgacatccggttgtgctggccgcagggaagttgtctggtaacaggcgcagatggcgacgaacagtggtttgatggtttgccctggtatttgaccgatctccgaccgcagggctttttagggcgcgcgtggggcaggaagttagccgcgcaactgaatctgactgatgatatacgtctctggcaggaagaagatgtgctctacgccctgaccgtatttaacggtgaatatactggcggttggttggtcggggaggggaattatcagcgatggattactgcacaacaccctgcggaaattcctctggatcaaaaactcacccattacgaacagctggcaagtgatgcactggcaggagaaattgtgggttcttctgcgggcggcgagcagccaaaatttacctactatgcacaaacgccgagtggcaataaacatgtgttggtgaaattcaccgtaccacagcaaaccgcggtcagccaacgttggggtgacctgctaattgctgaatctattgccgcgcaaatcctgcgtgacggtgggatccacgccatcgagagtacggtgcttgtaacaagtaacaggcaggtattcctcgaagcggaacgctttgactgcaaaggtaacgatggtcgcttgcctattgtgagcctggaggcggtgcagagtgagtttatctcttctccgggaagctggccgcaggcaatgcgccgtttgtgtgagcaacaacttgtcactcaccagagcgtggcgcaaacagaagtgatctgggcatttgggcgacttatcgccaacagcgatatgcacgcaggtaatttaagcttttatttatctgaaccgccatttgcgctgacgcccgtctacgacatgctgccgatggtctatgcaccaaacagcgctggaatgctgcgtgatgctgccattgaggtgaagtttgatcttaacgtcagtaaaagcgcttggttaacggcgatcccgctggcgcagcagttctggcaaacggtcgccagagatccgcgtatcagcgaggcgtttcgccacattgcgcaagaaatgccggaaaaaatccggcaaatcgaagagaaagttgcccgcatgggcgggtaattaccttacagcccccgccatccatgcgcttaactcccgtagctctttttcctgttccgggaagtcaaccaacagcgcttcgcactcctgttgcagcatatctgcgcggtacaggcagccttgcagtcgtccggcgagggcttccagcggcgcggggttgaggctgtcggtaaacacctgggcgcgggtgatatggcctttttcaacgtcgaaatgcagttccacgccgccccaggtaaagcgttcatccagcagatggctgaatgccggagcctgaccgaagttccattcccagctactctggcgggcaaaggtttcggcgaagtttggcaagtctggcgttttgttcggggagatgatttccgcttccacgcgctcgccataatgggcgaaaaaggcctcggttatggcctcgcaaacctgctcatgggtgatccccggcaacagctcggtgaggttggtcacgcgggaacgtacgctcgtaatgcctttcgccgccagtttctttttatccggattgagatagtttgccaggcggctgaggtcggcattgagtagcaaggtgccgtggtggaagccgcgatctttggtttcgcgataggcgctgccactgactttgcggtcgccttcgacggttttcaccaccagatcgttacgtccggacgcttcggcgctgacgccgagcgcgttcagcgcattgagcacaatgctcgtggagatagttttatcgtactccggcttgccagccataaaggtaaagcaggtattgccgagatcgtggaacaccgcgccgccaccgctactgcgccgcgccaggcggacgttatcttcttccatccgccgggtattacactctttccacgggttctgcgcgcgaccaattactaccgtgtcggcattgcgccagagaaacagaacgcgctgcgtggcgggcatttggcgaaaaatacactcttccaccgccaggttaaaccacgggtcgtaagagtcagagatgagcaggcgtaatgtggacataacgatttcctttcttgtagtaatgggtcactcttttttctcgctttcttcctcttccggcaccggtttgctggcggctaacaggaaggggctttgctgccagcgggtgcgtttaccctgtagcagcgtgcgggtcagcactacaccgattgccagactgagcagcaacatcaggcgtaaaatgttagtggtgttatccacctgttgggcttcggtggcgagcgtatgggtgtcgagtgtcaggcgcagatagccgagcggtccgtttttacccgcaattggctcgacaatctgctggttaaaatagccgcctgcttttttaccgtcgagcgccagccggtcgcgcacttcgacgctttcgccagaacgtgcgataagatcgccttgttcgtcatacacacccgcgtcgaggatacggctttcatccgttaactgatcgaggatcgcctgaatgcgtttttcatccggactgtcggtacgcatcagcggtgcaacgttcagcgtcacctgacgcgccagggtgcgggccagttcttccagctgtggattacgctgtcgctggtggttttgactaaaccaactcgctccctgcatcagcgccactaacaaggcaagacagaacaggacaatcactgcccgatgcagccggaatttcagttttgtgcgagccatcttccaccctttgaaaatttgagacttaatgttgccagaagcaatggatacaaggtagcctcatgcgttattttccctgcttcgaacgattttacaggagccttaatgcctaacattacctggtgcgacctgcctgaagatgtctctttatggccgggtctgcctcttagtttaagtggtgatgaagtgatgccactggattaccacgcaggtcgtagcggctggctgctgtatggtcgtgggctggataaacaacgtctgacccaataccagagcaaactgggtgcggcgatggtgattgttgccgcctggtgcgtggaagattatcaggtgattcgtctggcaggtagtctcaccgcacgggctacacgcctggcccacgaagcgcagctggatgtcgccccgctggggaaaatcccgcacctgcgcacgccgggtttgctggtgatggatatggactccaccgccatccagattgaatgtattgatgaaattgccaaactggccggaacgggcgagatggtggcggaagtaaccgaacgggcgatgcgcggcgaactcgattttaccgccagcctgcgcagccgtgtggcgacgctgaaaggcgctgacgccaatattctgcaacaggtgcgtgaaaatctgccgctgatgccaggcttaacgcaactggtgctcaagctggaaacgctgggctggaaagtggcgattgcctccggcggctttactttctttgctgaatacctgcgcgacaagctgcgcctgaccgccgtggtagccaatgaactggagatcatggacggtaaatttaccggcaatgtgatcggcgacatcgtagacgcgcagtacaaagcgaaaactctgactcgcctcgcgcaggagtatgaaatcccgctggcgcagaccgtggcgattggcgatggagccaatgacctgccgatgatcaaagcggcagggctggggattgcctaccatgccaagccaaaagtgaatgaaaaggcggaagtcaccatccgtcacgctgacctgatgggggtattctgcatcctcagtggcagcctgaatcagaagtaattgctcgcccgccatcctgcgggcggcacagcattaacgaggtacaccgtggcaaaagctccaaaacgcgcctttgtttgtaatgaatgcggggccgattatccgcgctggcaggggcagtgcagtgcctgtcatgcctggaacaccatcaccgaggtgcgtcttgctgcgagcccaatggtggcgcgtaacgagcgtctcagcggctatgccggtagcgccggggtggcaaaagtccagaaactctccgatatcagccttgaagagctgccgcgtttttccaccggatttaaagagttcgaccgcgtactaggcggcggcgtggtgccaggaagtgccattctgattggcggtaaccctggtgcggggaaatccacgctgctactgcaaacgctgtgcaaactggcccagcagatgaaaacgctgtatgtcaccggcgaagagagcctgcaacaggtggcaatgcgcgctcatcgccttggcctgccgactgacaatctcaatatgttgagcgaaaccagcatcgaacagatctgcctgattgccgaagaagagcaaccgaagctgatggtaattgacagcatccaggtgatgcatatggcggatgtacagagtagccctggtagcgtggcgcaggtgcgtgaaacggcggcttatttgacacgcttcgccaaaacgcgcggtgtggcgattgtcatggtggggcacgtaaccaaagatggtagcctggctggcccgaaagtgctggaacactgtatcgactgtagcgtgcttttggatggcgatgccgactcccgttttcgcaccttgcgcagccataaaaaccgcttcggcgcggtgaatgagctgggcgtcttcgcgatgaccgaacaggggctgcgtgaagtcagcaaccctagcgcaattttcttaagtcgcggcgatgaagtgacctccggtagcagtgtgatggtggtatgggaaggaacgcgtccactgctggtggagattcaggcgctggtcgatcacagcatgatggcgaacccacgccgcgtggcagtggggctggaacaaaaccgtctggcaatcctgctggctgtgttgcaccgtcacggtggtctgcaaatggccgatcaggatgtgtttgtgaacgtggtcggcggcgtgaaggtaaccgaaaccagtgccgacttagcgttactgctggcgatggtttccagcctgcgcgacagaccgctgccgcaggatctggtggtgtttggtgaagtcgggctggcaggggagatccgcccggtgcccagcggtcaggaacgaatctctgaagcggcgaaacacggttttcgccgggcgattgttccggcggctaacgtgccgaaaaaagcgccggaagggatgcagatttttggcgttaaaaaactctccgacgcgcttagcgtgttcgacgacttataatgagatatacggagggagatatgagcagttttgattacctgaaaactgccatcaagcaacagggctgcacgctacagcaggtagctgatgccagcggtatgaccaaagggtatttaagccagttactgaatgccaaaatcaaaagccccagcgcgcaaaagctggaggcgttgcaccgttttttggggcttgagtttccccggcagaagaaaacgatcggtgtcgtattcggtaagttctacccactgcataccggacatatctaccttatccagcgcgcctgtagccaggttgacgagctgcatatcattatgggttttgacgatacccgtgaccgcgcgttgttcgaagacagtgccatgagccagcagccgaccgtgccggatcgtctgcgttggttattgcaaacttttaaatatcagaaaaatattcgcattcatgctttcaacgaagagggcatggagccgtatccgcacggctgggatgtgtggagcaacggcatcaaaaagtttatggctgaaaaagggatccagccggatctgatctacaccagcgaagaagccgatgcgccacagtatatggaacatctggggatcgagacggtgctggtcgatccgaaacgtacctttatgagtatcagcggtgcgcagatccgcgaaaacccgttccgctactgggaatatattcctaccgaagtgaagccgttttttgtgcgtaccgtggcgatccttggcggcgagagcagcggtaaatccaccctggtaaacaaacttgccaatatcttcaacaccaccagtgcgtgggaatatggccgcgattatgtctttagtcacctcggcggtgatgagatcgcattgcagtattctgactacgataaaatcgcgctgggccacgctcaatacattgattttgcggtgaaatatgccaataaagtggcatttatcgataccgattttgtcaccactcaggcgttctgcaaaaagtacgaagggcgggaacatccgttcgtgcaggcgctgattgatgaataccgtttcgatctggtgatcctgctggagaacaacacgccgtgggtggcggatggtttacgcagcctcggcagtagcgtggatcgcaaagagttccagaacttgctggtggagatgctcgaagagaacaatatcgaatttgtgcgggttgaagaggaagattacgacagtcgtttcctgcgctgcgtggaactggtgcgggagatgatgggggagcagagataaccgtgatgaaactgctcaaaggcgaggtataaaatgagtttttttgatgagttgaaaacctctctggaagaggctgtcgagattaaacaaggtttgaaaaaacctgcacgggtgacccgccacgaaattgaggatgctaaggctgttgtagaccggaaacggtgttcacgccgcatccggcattcggtgctcaatgcctgatgcgacgcttaccgcgtcttatcaggcctacagttttacaacgtattgaaattgctggttttgtaggccggataaggcgttcgcgccgcatccggcattttacgcattacttcgcaatacgcttgtacttgatacgcttcggctccagcgcgtctgcgcccagcgtgcgtttcttgtactcttcgtactcggtaaagttaccttcgaagaactcaactttaccttcatcctggtaatccagaatgtgcgtggcgatacggtcgaggaaccaacggtcgtggctgataaccatcgcacagcccgggaactccagcagggcgttttccagcgcgcgcagggtttcgatatccaggtcgttggttggttcgtcgagcagcagcatgttgccgccaacctgcagcagcttcgccagatgcagacgaccgcgctcaccaccggagagttcaccaacgcgtttaccctgatcaacccctttaaagttaaagcggccaacgtaggcgcggcttggcatctcggtgttgccgatcttcatgatatccagcccgccggaaacttcttcccaaacggttttgctgttatccatactgtcacggaactgatcaacgctcgccagtttcaccgtttcacccaaagtgatggtgccgctgtccggctgttcctgaccagagatcatacggaacagggtgcttttacccgcaccgttcggaccgatgatcccgacgatcgctcctttcgggatgctgaagctcaggtcatcaatcagcagacgatcgccataggatttacgcaggttgctgacttccagcactttatcgcccagacgcggtccaggtggaataaacagttcgttggtttcgttacgtttctgatattcggtgctgttcagttcttcaaagcgcgccagacgtgctttacctttgctctgacggcctttagtaccttgacgtacccattccagctctttctcaatgctcttacgacgcgccgcttcttgactagcttcctgcgccaggcgctgatctttctgctccagccaggaggagtagttaccttcccacggaataccttcaccgcggtcaagttcgaggatccagcctgcaacgttatcgaggaagtaacggtcgtgggtaatcgccacaacggtgccttcgaagtcgtgcaggaagcgttccagccaggccacggattcggcatccaggtggttggtcggttcgtcgagcagcagcatgtctggtttttccagcagcaggcggcacaacgctacgcgacgacgttcaccaccggagaggttagcgattttcgcgtcccagtccggcagacgtagcgcatccgccgcacgctccagctgtacgttcagattatgaccgtcgtgagcctgaatgatctcttccagacggccttgttcagcggccagcttgtcaaaatcggcatccggatcggcgtacagcgcatacacttcatccaggcgtttcagggcgttaaccacttcactaaccgcttcttcaatggactcacgcacggtgtgttccgggttcagctgcggttcctgcggcagataaccaatcttgatgtctggctgcggacgcgcttcaccttcgatgtctttatcaatgcccgccataatgcgcagcagggtggacttacccgcgccattcagacccaggacaccaatttttgccccagggaagaaactcagagagatgtttttcaaaatatgacgtttcggcggaacaactttgccgacacgatgcatggtataaacgaattgagccacgttggacttcgcctctatgtttatcgtgataatgagttttcaaaggcgaagtgtagcctttttccccgcctaatcccagccggtcgatcaccctcgcagtaaaagtaaaaaagtgtccgtaacgtggcgtaaacggcaatgactggttagcataaatctattacgcggcatgacgctgcattgatgtatttacacttagaggatgcgcttgtggaaaaagccaaacaagttacctggcggctgttggctgccggtgtctgtctgctgacggtcagcagcgtggcgcgagccgacagtctggatgagcagcgtagtcgttacgcgcaaatcaagcaggcctgggataatcgacaaatggatgtggtcgaacaaatgatgcctggactgaaggattatccgctttatccctacctggaataccgccagatcaccgatgatctgatgaatcaaccggcggtgacggtcactaactttgttcgcgctaaccccacgcttcctcccgctcgcacgctgcaatctcgtttcgtcaatgaactggcgcggcgtgaagactggcgtggcttgttagcctttagcccggaaaagcccggaactaccgaagcgcaatgtaattactactatgcgaaatggaacaccgggcagagtgaagaagcctggcaaggggcgaaagagctgtggctaaccggcaagagccagcctaacgcctgtgacaagttatttagcgtctggcgtgcgagtggtaaacaagatccgctggcgtatttagagcgtatccgtctggcgatgaaagcgggtaacacaggcctggtaacagtgctggcagggcagatgcctgccgattaccagactatcgccagcgcaatcattagtctggcgaacaaccctaatacggtactgaccttcgcgcgtacaactggcgcgaccgattttacccgtcaaatggcggcggtggcgtttgccagtgtggcgcggcaggatgctgagaatgcacggctgatgatcccaagccttgcccaggcgcagcagcttaatgaagatcagattcaggagctgcgcgatatcgtcgcctggcgtttgatgggcaacgatgtcaccgacgagcaggcgaaatggcgcgatgacgccattatgcgcagccaatctactagccttattgaacgccgtgtacgaatggcgcttggcaccggcgatcgtcgcggcctgaatacctggctggcgcgtctgcctatggaagcgaaagagaaagatgaatggcgttactggcaggcggatttattgctggaacgcggacgtgaagctgaagcaaaagagattttgcatcaactcatgcaacagcgtggtttctacccgatggttgcagcacaacgcatcggcgaagagtatgagctgaagattgataaagcgccgcagaatgttgacagcgccctgactcaggggccggagatggcgcgcgtgcgcgagttgatgtactggaatctcgataataccgcgcgtagcgagtgggccaatctggtgaagagcaagagtaaaacagagcaggctcaactggcgcggtatgctttcaacaaccaatggtgggatcttagcgttcaggcaacgatcgccgggaagctgtgggatcatctggaagagcgattcccgctggcttacaacgatcttttcaaacgctacaccagcggtaaggagatcccgcaaagctatgcgatggcgattgctcgtcaggagagcgcctggaatccgaaagtgaaaagtccggtaggggccagcggcttgatgcagattatgcctggtacagcgacccatacggtgaagatgttctctattcccggttatagcagtcctgggcaattgctggatccggaaacgaatatcaacattggcaccagttacctgcaatatgtttatcagcagtttggcaataatcgtattttctccagtgcagcttataacgccggaccagggcgggtgcgaacctggcttggcaacagcgccgggcgtatcgacgcagtggcatttgtcgagagtattccattctccgagacgcgcggttatgtgaagaacgtgctggcttatgacgcttactaccgctatttcatgggggataaaccgacgttgatgagcgccacggaatggggacgtcgttactgatccgcacgtttatgatatgctatcgtactctttagcgagtacaaccgggggaggcattttgcttcccccgctaacaatggcgacatattatggcccaacaaagtccctatagtgcagcgatggcagaacagcgtcaccaggagtggttacgttttgtcgacctgcttaagaatgcctaccaaaacgatctccatttaccgttgttaaacctgatgctgacgccagatgagcgcgaagcgttggggactcgcgtgcgtattgtcgaagagctgttgcgcggcgaaatgagccagcgtgagttaaaaaatgaactcggcgcaggcatcgcgacgattacgcgtggatctaacagcctgaaagccgcgcccgtcgagctgcgccagtggctggaagaggtgttgctgaaaagcgattgattttgtaggcctgataagacgtggcgcatcaggcatcgtgcaccgaatgccggatgcggcgtgaacgccttatccgtcctacaaatacccgtaatttcaatatgtttggtaggcatgataagacgcggcagcgtcgcatcaggcgcttaatacacggcattatgaaacggactcagcgccaggatcaccgcctggtgatagacgctggcgcgagtgagtttcccggcggtaaacacgccgatcgccccttccttacgaccaatctcatcaataccggtataacggctcatcacgggaccaagcgcctcaccttcacgcactttttccagaatcaccgcaggcaacggcaaagtagcgctacgcgcctcgccgcgctggctggcgttttcaatcaccacccaactgaaagtgctgtcaccatcgatgccagcttcaatcgccacccaaaaatcagcctctggaagtaaacggcgggcattggctacccgatttcgtgcgccagcgcgcgtttcctcactgccaaagggctgttccggtacaccgctctcgacggcaacggatgcaatatggcaggatccttcgccgaagatctcgtgaaatgcctgcagaatggcctgaattttagcgggattggtggtcgcacagacaacttggtgcataatcagcattactcagaaaattaacgttacagcagtatacggaaaaaaagcatgttacaggtatacctagtccgccacggtgaaacgcagtggaacgccgagcgacgtattcagggccagtctgacagcccgctgaccgccaaaggtgagcaacaggcgatgcaggtggcaacccgtgccaaagagcttggcattacgcatatcatcagtagcgatttaggacgcacccggcgtacggcggaaatcatcgcccaggcctgcggctgtgacatcatctttgattctcgcctgcgtgaattaaacatgggtgtgctggaaaaaagacatatcgattctctgaccgaagaagaagagaactggcgtcggcagctggtcaatggcaccgttgacgggcgtattcctgaaggcgagagtatgcaggagctcagcgatcgcgtcaatgcggcactggaatcttgccgggacttaccgcagggaagccgaccgctgctggtgagtcatggtattgcactgggatgcctggtgagtacgattctcggattaccagcatgggcagagcgccgcttacgtctgcgtaactgttctattagccgcgtggattatcaggaaagcctgtggctggcgtctggctgggtcgttgaaaccgcaggggacatcagccatctggacgcccctgcattagatgagctgcagcgttaacgacggatcggaatcagcagttcacagcgtagattaattgggcgatctcccgctttggcatcttctgccgggtagtatcgctcaatatcctgacctttacggcgcgtcaggttgagcattggcatgcacgttccgtataccgtcaggataaactcctgcacgccggttcccagaccttcataggtaaacatcacatattcgccgccctgcagcatcaccggatgccccgtcagtacatagccatctgcctgatcctgggctaacgcggtggtatagaatacctcttgctcgtcgtctttatcctgactcggacgcgtttcattcaggccgtagagcaccggcggaatggtcggcgcgttgccgagaaaatcgtgccagaactgataacgcatttcatggcggaaatcagagatttgctccaggctacaggagtagctctgggtaacaccaatcagcggcgtatcttccagggtgacaaatttgtgctctggcatagtgaattcacccaggcgtagcggcgggcgaataccaaaggcgctccattcaggagaacggcggtaaagtgcaggagtctgggcaaactgcttcttgaatgcgcgggtaaatgtctgttgagagtcgaagcggtattgcagcgcgatgtccagaatcggacgcgcagtcaggcgtagtgcgaccgcgcttttgctcaaacgacgagcacgaatatacgcgccaatagcatggccagtgacatctttaaacattctctgtaagtgccacttggaataacctgctttcgccgctacattgtcgaggctcaggggctgatccagatgaccttccagccagattaaaaggtcgcgaataatgccggcctgatccataaaatatcctcatcctttcaacaacgagcacctgacatcaggtaattggataatagcattttttgctgttttagcattcagtgtttttttcttagtagagtatgttttagggcttgacggaaataaaagtattgagattttgttcttaatcaatatgttatttaccgtgacgaactaattgctcgtgtaatagataaaaatggtaacaatatgaaatacaagcatttgatcctgtctttaagcctgataatgctggggccattggctcatgcagaagagattggtagcgtcgacaccgtatttaaaatgatcggcccggatcacaaaattgttgtggaagcctttgatgatcccgatgtgaaaaatgtcacctgttatgtgagccgggcgaaaaccggtggtattaaagggggattgggtctggcggaagatacctccgatgcggccatttcttgtcagcaagtcgggccgattgaactgagcgatcgtattaaaaacggcaaagctcagggcgaggtagtattcaaaaaacgcacgtccctggtctttaagagcttacaggtcgtgcgcttttatgatgccaaacgcaacgcgctcgcttatctggcttactccgacaaagttgtagaaggtagcccgaaaaacgcgattagcgcggttcctgtcatgccgtggcggcaataacagaggcgatttatgcaacgggaaacggtctggttagtggaagatgagcaagggatagccgacacgctggtctacatgttgcagcaggaaggttttgccgtcgaggtctttgagcgaggcttgccggtgctggataaagctcgcaagcaggtacccgacgtcatgattctcgatgttggtctgccggatattagcggctttgaattgtgccgccagttactggcgctccatccggcgttacctgtactgttcctgacggcccgaagtgaagaggtcgatcgcctgcttgggctggaaattggtgctgacgactacgtggctaaaccgtttagtccccgcgaagtgtgcgccagggtgcgcaccttactgcgtcgggtgaagaagttcagcacgccgtctcccgtcatccgtattggacattttgaattgaatgaacccgcggcgcagatcagctggtttgacacgccattagcgctgactcggtatgagtttttattgttgaagacgttactcaagagtccgggccgcgtctggtcccgccagcaactgatggatagcgtatgggaagatgcgcaggacacctacgatcgcaccgtcgatacccacattaaaacgctgcgtgccaagctgcgcgccatcaaccccgatcttagtccgattaatactcatcgcggcatgggatatagcctgaggggcctgtaatgcgtatcggcatgcggttgttgctgggctattttttactggtggcggtggcagcctggttcgtactggccatttttgtcaaagaagttaaaccgggcgtgcgaagagcaacggaggggacgttgatcgacaccgcaacgttgctggcggagctggcgcgtcccgatttgctctctggggacccaacgcatgggcaactggcgcaggcgtttaatcagctacaacatcgcccgtttcgcgccaatatcggtggcattaacaaagtgcgcaatgaatatcatgtctatatgaccgatgcgcagggcaaagtattgttcgatagcgcaaataaagccgttggacaggattatagccgctggaatgacgtctggctaacgttgcgtggtcagtatggtgcgcgcagcacgttgcaaaatcctgccgatcccgaaagttctgtgatgtatgttgccgcaccgattatggacggcagccggcttattggcgttttgagcgtaggcaaaccgaacgcggcgatggctccggtcattaagcgtagcgagcggcgaattttatgggccagcgccattttgttggggattgcactggtgattggcgcaggcatggtttggtggatcaaccgctctattgcccggctcactcgctatgctgattccgtcactgacaataagcccgttcctctccccgatctcggtagtagcgagttgcgtaaactcgcgcaggcgctggaaagtatgcgcgtgaagctggaagggaaaaactatattgagcagtatgtttacgcattaactcatgagctaaaaagcccactggcggcgattcgtggagcggcggaaattttacgcgaaggtccgccgccggaagtggtggctcgttttactgacaacattctgacgcaaaatgcgcgtatgcaggcattggtagaaacgttactacgccaggcaagactggagaatcgtcaggaagtcgttctgactgctgttgatgtggcggcattattccgccgcgtcagcgaagcgcgcaccgtgcagttggcagaaaaaaaaatcactctgcatgttacgcccaccgaggttaacgttgctgctgaaccggcgttactggagcaggcgctgggaaatttactggataacgccatcgattttacccccgagagcggttgcatcacgctaagcgccgaagtggatcaggaacacgtcacgcttaaggtgctggataccggtagtggtattcctgactacgcgcttagtcgtatttttgaacgcttttactctttgcctcgtgcaaatgggcaaaaaagcagcggtctggggttggcgttcgtcagtgaggtcgcccgtttgtttaacggcgaagtcacgctgcgcaacgtgcaggaaggtggcgtgctggccagccttcgacttcaccgtcacttcacataacttcaaattcttcccacatagtcttcgtatcctgctgccattgcaaaggagaagactatgttgaaatcccccctgttctggaaaatgactagcctgtttggtgcagtattgctgttgttgattccgataatgctgattcggcaggtgattgtcgaacgtgctgattaccgtagcgatgtggaagatgcgattcgccaaagtaccagcgggccgcaaaaactcgttgggccgctcatcgctattcctgtgaccgagctttatacggtgcaggaagaggataaaaccgtggagcggaaacgaagttttatccatttttggttacctgagagtttgatggttgatggcaatcagaacgtggaagaacgcaagatagggatttataccggtcaggtctggcacagtgatttaacgttaaaagccgatttcgatgttagccgtcttagcgaactcaacgcgccaaatatcaccttaggcaagccatttattgtgattagcgtcggggatgcgcgtggtattggtgtggtgaaagcgcctgaagttaacggaacggcgctgaccattgaacccggcaccgggttagagcaaggcgggcagggcgtgcatatccctttacctgaaggggactggcggaagcagaacctgaagctgaatatggccctgaatttaagcggtaccggcgatctttctgtggtgcctggcgggcgtaatagcgaaatgaccttaaccagcaactggccgcatcccagttttttaggtgattttctaccagccaaacgggaagttagcgagagtggttttcaggcgcactggcaaagcagctggtttgctaataatctcggtgagcgttttgctagtggcaatgataccggctgggaaaacttcccggcgtttagcgtcgcagtaacgacgccagccgatcaataccaattaactgaccgggcgactaagtacgccattctgctgattgcactgacttttatggcgttctttgtttttgaaacgctcaccgcgcaacgtttacacccaatgcaatatttgctggtggggcttagtttggtgatgttttatttgctcttgctggcgctttctgaacataccggttttaccgtggcatggataatcgccagtctgattggggcgataatgaacggtatttatttgcaagcggtattgaaaggttggtgcaacagcatgttgtttaccctcgcgctgttgttgctggatggtgtgatgtggggactgctcaactctgccgatagcgcgctgttgttgggaaccagtgtgctggtggtggcgctggccggcatgatgtttgtgacccgtaatatcgactggtatgcgtttagtctgccgaaaatgaaagccagtaaagaagttacaacggacgatgagttacgtatctggaaataaggttgaaaaataaaaacggcgctaaaaagcgccgttttttttgacggtggtaaagccgattaatcttccagatcaccgcagaagcgataaccttcaccgtgaatggtggcgatgatttccggcgtatccggcgtagattcgaaatgtttacgaatacggcggatcgtcacgtctacagtacggtcgtgcggtttcagctcacggccggtcattttcttcagcagttcagcacgggactgaattttgcctgggttttcacagaagtgaagcatggcgcggaactcgctgcgcggcagcttgtactgctcgccatcagggccgatcaagctacggctgttgatgtccagttcccaaccattgaacttgtagctttcaacgctacgacgttcttcgctgacagtacccagattcatggtacgggacagtaggttgcgtgcacgaatcgtcagttcacgcgggttgaacggtttggtgatgtagtcatctgcaccgatttcgaggccgagaattttatcgacttcgttgtcacggccagtcaggaacatcaacgcaacattcgcctgctcgcgcagttcacgcgctaacagaagaccgttcttacccggcagattgatatccatgatcaccaggttgatgtcatattcagagaggatctgatgcatttccgcgccatctgtcgcttcgaaaacatcatagccttccgcttcgaaaatacttttcaacgtgttgcgtgttaccaactcgtcttcaacgataagaatgtgcggggtctgcatgtttgctacctaaattgccaactaaatcgaaacaggaagtacaaaagtccctgacctgcctgatgcatgctgcaaattaacatgatcggcgtaacatgactaaagtacgtaattgcgttcttgatgcactttccatcaacgtcaacaacatcattagcttggtcgtgggtactttccctcaggacccgacagtgagtaaaacggctgtcatcctaaccattttaacagcaacataacaggctaagaggggccggacacccaataaaactacgcttcgttgacatatatcaagttcaattgtagcacgttaacagtttgatgaaatcatcgtatctaaatgctagctttcgtcacattattttaataatccaactagttgcatcatacaactaataaacgtggtgaatccaattgtcgagatttattttttataaaattatcctaagtaaacagaaggatatgtagcattttttaacaactcaaccgttagtacagtcaggaaatagtttagccttttttaagctaagtaaagggctttttctgcgacttacgttaagaatttgtaaattcgcaccgcgtaataagttgacagtgatcacccggttcgcggttatttgatcaagaagagtggcaatatgcgtataacgattattctggtcgcacccgccagagcagaaaatattggggcagcggcgcgggcaatgaaaacgatggggtttagcgatctgcggattgtcgatagtcaggcacacctggagccagccacccgctgggtcgcacatggatctggtgatattattgataatattaaagttttcccgacattggctgaaagcttacacgatgtcgatttcactgtcgccaccactgcgcgcagtcgggcgaaatatcattactacgccacgccagttgaactggtgccgctgttagaggaaaaatctagttggatgagccatgccgcgctggtgtttggtcgcgaagattccgggttgactaacgaagagttagcgttggctgacgttcttactggtgtgccgatggtggcggattatcctagcctcaatctggggcaggcggtgatggtctattgctatcaattagcaacattaatacaacaaccggcgaaaagtgatgcaacggcagaccaacatcaactgcaagctttacgcgaacgagccatgacattgctgacgactctggcagtggcagatgacataaaactggtcgactggttacaacaacgcctggggcttttagagcaacgagacacggcaatgttgcaccgtttgctgcatgatattgaaaaaaatatcaccaaataaaaaacgccttagtaagtatttttc
